United States Patent Application Publication US 2023/0227576 A1 - sequence listing, part 2

SEQ ID NO: 37011 - protein, 6 aa, synthetic construct
PYERPE

SEQ ID NO: 37012 - protein, 6 aa, synthetic construct
PYERPF

SEQ ID NO: 37013 - protein, 6 aa, synthetic construct
PYERPW

SEQ ID NO: 37014 - protein, 6 aa, synthetic construct
PYERPY

SEQ ID NO: 37015 - protein, 6 aa, synthetic construct
PYERSD

SEQ ID NO: 37016 - protein, 6 aa, synthetic construct
PYERSE

SEQ ID NO: 37017 - protein, 6 aa, synthetic construct
PYERSF

SEQ ID NO: 37018 - protein, 6 aa, synthetic construct
PYERSW

SEQ ID NO: 37019 - protein, 6 aa, synthetic construct
PYERSY

SEQ ID NO: 37020 - protein, 6 aa, synthetic construct
PYERTD

SEQ ID NO: 37021 - protein, 6 aa, synthetic construct
PYERTE

SEQ ID NO: 37022 - protein, 6 aa, synthetic construct
PYERTF

SEQ ID NO: 37023 - protein, 6 aa, synthetic construct
PYERTW

SEQ ID NO: 37024 - protein, 6 aa, synthetic construct
PYERTY

SEQ ID NO: 37025 - protein, 6 aa, synthetic construct
PYERWD

SEQ ID NO: 37026 - protein, 6 aa, synthetic construct
PYERWE

SEQ ID NO: 37027 - protein, 6 aa, synthetic construct
PYERWF

SEQ ID NO: 37028 - protein, 6 aa, synthetic construct
PYERWW

SEQ ID NO: 37029 - protein, 6 aa, synthetic construct
PYERWY

SEQ ID NO: 37030 - protein, 6 aa, synthetic construct
PYERYD

SEQ ID NO: 37031 - protein, 6 aa, synthetic construct
PYERYE

SEQ ID NO: 37032 - protein, 6 aa, synthetic construct
PYERYF

SEQ ID NO: 37033 - protein, 6 aa, synthetic construct
PYERYW

SEQ ID NO: 37034 - protein, 6 aa, synthetic construct
PYERYY

SEQ ID NO: 37035 - protein, 6 aa, synthetic construct
PYERVD

SEQ ID NO: 37036 - protein, 6 aa, synthetic construct
PYERVE

SEQ ID NO: 37037 - protein, 6 aa, synthetic construct
PYERVF

SEQ ID NO: 37038 - protein, 6 aa, synthetic construct
PYERVW

SEQ ID NO: 37039 - protein, 6 aa, synthetic construct
PYERVY

SEQ ID NO: 37040 - protein, 6 aa, synthetic construct
PYENAD

SEQ ID NO: 37041 - protein, 6 aa, synthetic construct
PYENAE

SEQ ID NO: 37042 - protein, 6 aa, synthetic construct
PYENAF

SEQ ID NO: 37043 - protein, 6 aa, synthetic construct
PYENAW

SEQ ID NO: 37044 - protein, 6 aa, synthetic construct
PYENAY

SEQ ID NO: 37045 - protein, 6 aa, synthetic construct
PYENRD

SEQ ID NO: 37046 - protein, 6 aa, synthetic construct
PYENRE

SEQ ID NO: 37047 - protein, 6 aa, synthetic construct
PYENRF

SEQ ID NO: 37048 - protein, 6 aa, synthetic construct
PYENRW

SEQ ID NO: 37049 - protein, 6 aa, synthetic construct
PYENRY

SEQ ID NO: 37050 - protein, 6 aa, synthetic construct
PYENND

SEQ ID NO: 37051 - protein, 6 aa, synthetic construct
PYENNE

SEQ ID NO: 37052 - protein, 6 aa, synthetic construct
PYENNF

SEQ ID NO: 37053 - protein, 6 aa, synthetic construct
PYENNW

SEQ ID NO: 37054 - protein, 6 aa, synthetic construct
PYENNY

SEQ ID NO: 37055 - protein, 6 aa, synthetic construct
PYENDD

SEQ ID NO: 37056 - protein, 6 aa, synthetic construct
PYENDE

SEQ ID NO: 37057 - protein, 6 aa, synthetic construct
PYENDF

SEQ ID NO: 37058 - protein, 6 aa, synthetic construct
PYENDW

SEQ ID NO: 37059 - protein, 6 aa, synthetic construct
PYENDY

SEQ ID NO: 37060 - protein, 6 aa, synthetic construct
PYENCD

SEQ ID NO: 37061 - protein, 6 aa, synthetic construct
PYENCE

SEQ ID NO: 37062 - protein, 6 aa, synthetic construct
PYENCF

SEQ ID NO: 37063 - protein, 6 aa, synthetic construct
PYENCW

SEQ ID NO: 37064 - protein, 6 aa, synthetic construct
PYENCY

SEQ ID NO: 37065 - protein, 6 aa, synthetic construct
PYENQD

SEQ ID NO: 37066 - protein, 6 aa, synthetic construct
PYENQE

SEQ ID NO: 37067 - protein, 6 aa, synthetic construct
PYENQF

SEQ ID NO: 37068 - protein, 6 aa, synthetic construct
PYENQW

SEQ ID NO: 37069 - protein, 6 aa, synthetic construct
PYENQY

SEQ ID NO: 37070 - protein, 6 aa, synthetic construct
PYENED

SEQ ID NO: 37071 - protein, 6 aa, synthetic construct
PYENEE

SEQ ID NO: 37072 - protein, 6 aa, synthetic construct
PYENEF

SEQ ID NO: 37073 - protein, 6 aa, synthetic construct
PYENEW

SEQ ID NO: 37074 - protein, 6 aa, synthetic construct
PYENEY

SEQ ID NO: 37075 - protein, 6 aa, synthetic construct
PYENGD

SEQ ID NO: 37076 - protein, 6 aa, synthetic construct
PYENGE

SEQ ID NO: 37077 - protein, 6 aa, synthetic construct
PYENGF

SEQ ID NO: 37078 - protein, 6 aa, synthetic construct
PYENGW

SEQ ID NO: 37079 - protein, 6 aa, synthetic construct
PYENGY

SEQ ID NO: 37080 - protein, 6 aa, synthetic construct
PYENHD

SEQ ID NO: 37081 - protein, 6 aa, synthetic construct
PYENHE

SEQ ID NO: 37082 - protein, 6 aa, synthetic construct
PYENHF

SEQ ID NO: 37083 - protein, 6 aa, synthetic construct
PYENHW

SEQ ID NO: 37084 - protein, 6 aa, synthetic construct
PYENHY

SEQ ID NO: 37085 - protein, 6 aa, synthetic construct
PYENID

SEQ ID NO: 37086 - protein, 6 aa, synthetic construct
PYENIE

SEQ ID NO: 37087 - protein, 6 aa, synthetic construct
PYENIF

SEQ ID NO: 37088 - protein, 6 aa, synthetic construct
PYENIW

SEQ ID NO: 37089 - protein, 6 aa, synthetic construct
PYENIY

SEQ ID NO: 37090 - protein, 6 aa, synthetic construct
PYENLD

SEQ ID NO: 37091 - protein, 6 aa, synthetic construct
PYENLE

SEQ ID NO: 37092 - protein, 6 aa, synthetic construct
PYENLF

SEQ ID NO: 37093 - protein, 6 aa, synthetic construct
PYENLW

SEQ ID NO: 37094 - protein, 6 aa, synthetic construct
PYENLY

SEQ ID NO: 37095 - protein, 6 aa, synthetic construct
PYENKD

SEQ ID NO: 37096 - protein, 6 aa, synthetic construct
PYENKE

SEQ ID NO: 37097 - protein, 6 aa, synthetic construct
PYENKF

SEQ ID NO: 37098 - protein, 6 aa, synthetic construct
PYENKW

SEQ ID NO: 37099 - protein, 6 aa, synthetic construct
PYENKY

SEQ ID NO: 37100 - protein, 6 aa, synthetic construct
PYENMD

SEQ ID NO: 37101 - protein, 6 aa, synthetic construct
PYENME

SEQ ID NO: 37102 - protein, 6 aa, synthetic construct
PYENMF

SEQ ID NO: 37103 - protein, 6 aa, synthetic construct
PYENMW

SEQ ID NO: 37104 - protein, 6 aa, synthetic construct
PYENMY

SEQ ID NO: 37105 - protein, 6 aa, synthetic construct
PYENFD

SEQ ID NO: 37106 - protein, 6 aa, synthetic construct
PYENFE

SEQ ID NO: 37107 - protein, 6 aa, synthetic construct
PYENFF

SEQ ID NO: 37108 - protein, 6 aa, synthetic construct
PYENFW

SEQ ID NO: 37109 - protein, 6 aa, synthetic construct
PYENFY

SEQ ID NO: 37110 - protein, 6 aa, synthetic construct
PYENPD

SEQ ID NO: 37111 - protein, 6 aa, synthetic construct
PYENPE

SEQ ID NO: 37112 - protein, 6 aa, synthetic construct
PYENPF

SEQ ID NO: 37113 - protein, 6 aa, synthetic construct
PYENPW

SEQ ID NO: 37114 - protein, 6 aa, synthetic construct
PYENPY

SEQ ID NO: 37115 - protein, 6 aa, synthetic construct
PYENSD

SEQ ID NO: 37116 - protein, 6 aa, synthetic construct
PYENSE

SEQ ID NO: 37117 - protein, 6 aa, synthetic construct
PYENSF

SEQ ID NO: 37118 - protein, 6 aa, synthetic construct
PYENSW

SEQ ID NO: 37119 - protein, 6 aa, synthetic construct
PYENSY

SEQ ID NO: 37120 - protein, 6 aa, synthetic construct
PYENTD

SEQ ID NO: 37121 - protein, 6 aa, synthetic construct
PYENTE

SEQ ID NO: 37122 - protein, 6 aa, synthetic construct
PYENTF

SEQ ID NO: 37123 - protein, 6 aa, synthetic construct
PYENTW

SEQ ID NO: 37124 - protein, 6 aa, synthetic construct
PYENTY

SEQ ID NO: 37125 - protein, 6 aa, synthetic construct
PYENWD

SEQ ID NO: 37126 - protein, 6 aa, synthetic construct
PYENWE

SEQ ID NO: 37127 - protein, 6 aa, synthetic construct
PYENWF

SEQ ID NO: 37128 - protein, 6 aa, synthetic construct
PYENWW

SEQ ID NO: 37129 - protein, 6 aa, synthetic construct
PYENWY

SEQ ID NO: 37130 - protein, 6 aa, synthetic construct
PYENYD

SEQ ID NO: 37131 - protein, 6 aa, synthetic construct
PYENYE

SEQ ID NO: 37132 - protein, 6 aa, synthetic construct
PYENYF

SEQ ID NO: 37133 - protein, 6 aa, synthetic construct
PYENYW

SEQ ID NO: 37134 - protein, 6 aa, synthetic construct
PYENYY

SEQ ID NO: 37135 - protein, 6 aa, synthetic construct
PYENVD

SEQ ID NO: 37136 - protein, 6 aa, synthetic construct
PYENVE

SEQ ID NO: 37137 - protein, 6 aa, synthetic construct
PYENVF

SEQ ID NO: 37138 - protein, 6 aa, synthetic construct
PYENVW

SEQ ID NO: 37139 - protein, 6 aa, synthetic construct
PYENVY

SEQ ID NO: 37140 - protein, 6 aa, synthetic construct
PYEDAD

SEQ ID NO: 37141 - protein, 6 aa, synthetic construct
PYEDAE

SEQ ID NO: 37142 - protein, 6 aa, synthetic construct
PYEDAF

SEQ ID NO: 37143 - protein, 6 aa, synthetic construct
PYEDAW

SEQ ID NO: 37144 - protein, 6 aa, synthetic construct
PYEDAY

SEQ ID NO: 37145 - protein, 6 aa, synthetic construct
PYEDRD

SEQ ID NO: 37146 - protein, 6 aa, synthetic construct
PYEDRE

SEQ ID NO: 37147 - protein, 6 aa, synthetic construct
PYEDRF

SEQ ID NO: 37148 - protein, 6 aa, synthetic construct
PYEDRW

SEQ ID NO: 37149 - protein, 6 aa, synthetic construct
PYEDRY

SEQ ID NO: 37150 - protein, 6 aa, synthetic construct
PYEDND

SEQ ID NO: 37151 - protein, 6 aa, synthetic construct
PYEDNE

SEQ ID NO: 37152 - protein, 6 aa, synthetic construct
PYEDNF

SEQ ID NO: 37153 - protein, 6 aa, synthetic construct
PYEDNW

SEQ ID NO: 37154 - protein, 6 aa, synthetic construct
PYEDNY

SEQ ID NO: 37155 - protein, 6 aa, synthetic construct
PYEDDD

SEQ ID NO: 37156 - protein, 6 aa, synthetic construct
PYEDDE

SEQ ID NO: 37157 - protein, 6 aa, synthetic construct
PYEDDF

SEQ ID NO: 37158 - protein, 6 aa, synthetic construct
PYEDDW

SEQ ID NO: 37159 - protein, 6 aa, synthetic construct
PYEDDY

SEQ ID NO: 37160 - protein, 6 aa, synthetic construct
PYEDCD

SEQ ID NO: 37161 - protein, 6 aa, synthetic construct
PYEDCE

SEQ ID NO: 37162 - protein, 6 aa, synthetic construct
PYEDCF

SEQ ID NO: 37163 - protein, 6 aa, synthetic construct
PYEDCW

SEQ ID NO: 37164 - protein, 6 aa, synthetic construct
PYEDCY

SEQ ID NO: 37165 - protein, 6 aa, synthetic construct
PYEDQD

SEQ ID NO: 37166 - protein, 6 aa, synthetic construct
PYEDQE

SEQ ID NO: 37167 - protein, 6 aa, synthetic construct
PYEDQF

SEQ ID NO: 37168 - protein, 6 aa, synthetic construct
PYEDQW

SEQ ID NO: 37169 - protein, 6 aa, synthetic construct
PYEDQY

SEQ ID NO: 37170 - protein, 6 aa, synthetic construct
PYEDED

SEQ ID NO: 37171 - protein, 6 aa, synthetic construct
PYEDEE

SEQ ID NO: 37172 - protein, 6 aa, synthetic construct
PYEDEF

SEQ ID NO: 37173 - protein, 6 aa, synthetic construct
PYEDEW

SEQ ID NO: 37174 - protein, 6 aa, synthetic construct
PYEDEY

SEQ ID NO: 37175 - protein, 6 aa, synthetic construct
PYEDGD

SEQ ID NO: 37176 - protein, 6 aa, synthetic construct
PYEDGE

SEQ ID NO: 37177 - protein, 6 aa, synthetic construct
PYEDGF

SEQ ID NO: 37178 - protein, 6 aa, synthetic construct
PYEDGW

SEQ ID NO: 37179 - protein, 6 aa, synthetic construct
PYEDGY

SEQ ID NO: 37180 - protein, 6 aa, synthetic construct
PYEDHD

SEQ ID NO: 37181 - protein, 6 aa, synthetic construct
PYEDHE

SEQ ID NO: 37182 - protein, 6 aa, synthetic construct
PYEDHF

SEQ ID NO: 37183 - protein, 6 aa, synthetic construct
PYEDHW

SEQ ID NO: 37184 - protein, 6 aa, synthetic construct
PYEDHY

SEQ ID NO: 37185 - protein, 6 aa, synthetic construct
PYEDID

SEQ ID NO: 37186 - protein, 6 aa, synthetic construct
PYEDIE

SEQ ID NO: 37187 - protein, 6 aa, synthetic construct
PYEDIF

SEQ ID NO: 37188 - protein, 6 aa, synthetic construct
PYEDIW

SEQ ID NO: 37189 - protein, 6 aa, synthetic construct
PYEDIY

SEQ ID NO: 37190 - protein, 6 aa, synthetic construct
PYEDLD

SEQ ID NO: 37191 - protein, 6 aa, synthetic construct
PYEDLE

SEQ ID NO: 37192 - protein, 6 aa, synthetic construct
PYEDLF

SEQ ID NO: 37193 - protein, 6 aa, synthetic construct
PYEDLW

SEQ ID NO: 37194 - protein, 6 aa, synthetic construct
PYEDLY

SEQ ID NO: 37195 - protein, 6 aa, synthetic construct
PYEDKD

SEQ ID NO: 37196 - protein, 6 aa, synthetic construct
PYEDKE

SEQ ID NO: 37197 - protein, 6 aa, synthetic construct
PYEDKF

SEQ ID NO: 37198 - protein, 6 aa, synthetic construct
PYEDKW

SEQ ID NO: 37199 - protein, 6 aa, synthetic construct
PYEDKY

SEQ ID NO: 37200 - protein, 6 aa, synthetic construct
PYEDMD

SEQ ID NO: 37201 - protein, 6 aa, synthetic construct
PYEDME

SEQ ID NO: 37202 - protein, 6 aa, synthetic construct
PYEDMF

SEQ ID NO: 37203 - protein, 6 aa, synthetic construct
PYEDMW

SEQ ID NO: 37204 - protein, 6 aa, synthetic construct
PYEDMY

SEQ ID NO: 37205 - protein, 6 aa, synthetic construct
PYEDFD

SEQ ID NO: 37206 - protein, 6 aa, synthetic construct
PYEDFE

SEQ ID NO: 37207 - protein, 6 aa, synthetic construct
PYEDFF

SEQ ID NO: 37208 - protein, 6 aa, synthetic construct
PYEDFW

SEQ ID NO: 37209 - protein, 6 aa, synthetic construct
PYEDFY

SEQ ID NO: 37210 - protein, 6 aa, synthetic construct
PYEDPD

SEQ ID NO: 37211 - protein, 6 aa, synthetic construct
PYEDPE

SEQ ID NO: 37212 - protein, 6 aa, synthetic construct
PYEDPF

SEQ ID NO: 37213 - protein, 6 aa, synthetic construct
PYEDPW

SEQ ID NO: 37214 - protein, 6 aa, synthetic construct
PYEDPY

SEQ ID NO: 37215 - protein, 6 aa, synthetic construct
PYEDSD

SEQ ID NO: 37216 - protein, 6 aa, synthetic construct
PYEDSE

SEQ ID NO: 37217 - protein, 6 aa, synthetic construct
PYEDSF

SEQ ID NO: 37218 - protein, 6 aa, synthetic construct
PYEDSW

SEQ ID NO: 37219 - protein, 6 aa, synthetic construct
PYEDSY

SEQ ID NO: 37220 - protein, 6 aa, synthetic construct
PYEDTD

SEQ ID NO: 37221 - protein, 6 aa, synthetic construct
PYEDTE

SEQ ID NO: 37222 - protein, 6 aa, synthetic construct
PYEDTF

SEQ ID NO: 37223 - protein, 6 aa, synthetic construct
PYEDTW

SEQ ID NO: 37224 - protein, 6 aa, synthetic construct
PYEDTY

SEQ ID NO: 37225 - protein, 6 aa, synthetic construct
PYEDWD

SEQ ID NO: 37226 - protein, 6 aa, synthetic construct
PYEDWE

SEQ ID NO: 37227 - protein, 6 aa, synthetic construct
PYEDWF

SEQ ID NO: 37228 - protein, 6 aa, synthetic construct
PYEDWW

SEQ ID NO: 37229 - protein, 6 aa, synthetic construct
PYEDWY

SEQ ID NO: 37230 - protein, 6 aa, synthetic construct
PYEDYD

SEQ ID NO: 37231 - protein, 6 aa, synthetic construct
PYEDYE

SEQ ID NO: 37232 - protein, 6 aa, synthetic construct
PYEDYF

SEQ ID NO: 37233 - protein, 6 aa, synthetic construct
PYEDYW

SEQ ID NO: 37234 - protein, 6 aa, synthetic construct
PYEDYY

SEQ ID NO: 37235 - protein, 6 aa, synthetic construct
PYEDVD

SEQ ID NO: 37236 - protein, 6 aa, synthetic construct
PYEDVE

SEQ ID NO: 37237 - protein, 6 aa, synthetic construct
PYEDVF

SEQ ID NO: 37238 - protein, 6 aa, synthetic construct
PYEDVW

SEQ ID NO: 37239 - protein, 6 aa, synthetic construct
PYEDVY

SEQ ID NO: 37240 - protein, 6 aa, synthetic construct
PYECAD

SEQ ID NO: 37241 - protein, 6 aa, synthetic construct
PYECAE

SEQ ID NO: 37242 - protein, 6 aa, synthetic construct
PYECAF

SEQ ID NO: 37243 - protein, 6 aa, synthetic construct
PYECAW

SEQ ID NO: 37244 - protein, 6 aa, synthetic construct
PYECAY

SEQ ID NO: 37245 - protein, 6 aa, synthetic construct
PYECRD

SEQ ID NO: 37246 - protein, 6 aa, synthetic construct
PYECRE

SEQ ID NO: 37247 - protein, 6 aa, synthetic construct
PYECRF

SEQ ID NO: 37248 - protein, 6 aa, synthetic construct
PYECRW

SEQ ID NO: 37249 - protein, 6 aa, synthetic construct
PYECRY

SEQ ID NO: 37250 - protein, 6 aa, synthetic construct
PYECND

SEQ ID NO: 37251 - protein, 6 aa, synthetic construct
PYECNE

SEQ ID NO: 37252 - protein, 6 aa, synthetic construct
PYECNF

SEQ ID NO: 37253 - protein, 6 aa, synthetic construct
PYECNW

SEQ ID NO: 37254 - protein, 6 aa, synthetic construct
PYECNY

SEQ ID NO: 37255 - protein, 6 aa, synthetic construct
PYECDD

SEQ ID NO: 37256 - protein, 6 aa, synthetic construct
PYECDE

SEQ ID NO: 37257 - protein, 6 aa, synthetic construct
PYECDF

SEQ ID NO: 37258 - protein, 6 aa, synthetic construct
PYECDW

SEQ ID NO: 37259 - protein, 6 aa, synthetic construct
PYECDY

SEQ ID NO: 37260 - protein, 6 aa, synthetic construct
PYECCD

SEQ ID NO: 37261 - protein, 6 aa, synthetic construct
PYECCE

SEQ ID NO: 37262 - protein, 6 aa, synthetic construct
PYECCF

SEQ ID NO: 37263 - protein, 6 aa, synthetic construct
PYECCW

SEQ ID NO: 37264 - protein, 6 aa, synthetic construct
PYECCY

SEQ ID NO: 37265 - protein, 6 aa, synthetic construct
PYECQD

SEQ ID NO: 37266 - protein, 6 aa, synthetic construct
PYECQE

SEQ ID NO: 37267 - protein, 6 aa, synthetic construct
PYECQF

SEQ ID NO: 37268 - protein, 6 aa, synthetic construct
PYECQW

SEQ ID NO: 37269 - protein, 6 aa, synthetic construct
PYECQY

SEQ ID NO: 37270 - protein, 6 aa, synthetic construct
PYECED

SEQ ID NO: 37271 - protein, 6 aa, synthetic construct
PYECEE

SEQ ID NO: 37272 - protein, 6 aa, synthetic construct
PYECEF

SEQ ID NO: 37273 - protein, 6 aa, synthetic construct
PYECEW

SEQ ID NO: 37274 - protein, 6 aa, synthetic construct
PYECEY

SEQ ID NO: 37275 - protein, 6 aa, synthetic construct
PYECGD

SEQ ID NO: 37276 - protein, 6 aa, synthetic construct
PYECGE

SEQ ID NO: 37277 - protein, 6 aa, synthetic construct
PYECGF

SEQ ID NO: 37278 - protein, 6 aa, synthetic construct
PYECGW

SEQ ID NO: 37279 - protein, 6 aa, synthetic construct
PYECGY

SEQ ID NO: 37280 - protein, 6 aa, synthetic construct
PYECHD

SEQ ID NO: 37281 - protein, 6 aa, synthetic construct
PYECHE

SEQ ID NO: 37282 - protein, 6 aa, synthetic construct
PYECHF

SEQ ID NO: 37283 - protein, 6 aa, synthetic construct
PYECHW

SEQ ID NO: 37284 - protein, 6 aa, synthetic construct
PYECHY

SEQ ID NO: 37285 - protein, 6 aa, synthetic construct
PYECID

SEQ ID NO: 37286 - protein, 6 aa, synthetic construct
PYECIE

SEQ ID NO: 37287 - protein, 6 aa, synthetic construct
PYECIF

SEQ ID NO: 37288 - protein, 6 aa, synthetic construct
PYECIW

SEQ ID NO: 37289 - protein, 6 aa, synthetic construct
PYECIY

SEQ ID NO: 37290 - protein, 6 aa, synthetic construct
PYECLD

SEQ ID NO: 37291 - protein, 6 aa, synthetic construct
PYECLE

SEQ ID NO: 37292 - protein, 6 aa, synthetic construct
PYECLF

SEQ ID NO: 37293 - protein, 6 aa, synthetic construct
PYECLW

SEQ ID NO: 37294 - protein, 6 aa, synthetic construct
PYECLY

SEQ ID NO: 37295 - protein, 6 aa, synthetic construct
PYECKD

SEQ ID NO: 37296 - protein, 6 aa, synthetic construct
PYECKE

SEQ ID NO: 37297 - protein, 6 aa, synthetic construct
PYECKF

SEQ ID NO: 37298 - protein, 6 aa, synthetic construct
PYECKW

SEQ ID NO: 37299 - protein, 6 aa, synthetic construct
PYECKY

SEQ ID NO: 37300 - protein, 6 aa, synthetic construct
PYECMD

SEQ ID NO: 37301 - protein, 6 aa, synthetic construct
PYECME

SEQ ID NO: 37302 - protein, 6 aa, synthetic construct
PYECMF

SEQ ID NO: 37303 - protein, 6 aa, synthetic construct
PYECMW

SEQ ID NO: 37304 - protein, 6 aa, synthetic construct
PYECMY

SEQ ID NO: 37305 - protein, 6 aa, synthetic construct
PYECFD

SEQ ID NO: 37306 - protein, 6 aa, synthetic construct
PYECFE

SEQ ID NO: 37307 - protein, 6 aa, synthetic construct
PYECFF

SEQ ID NO: 37308 - protein, 6 aa, synthetic construct
PYECFW

SEQ ID NO: 37309 - protein, 6 aa, synthetic construct
PYECFY

SEQ ID NO: 37310 - protein, 6 aa, synthetic construct
PYECPD

SEQ ID NO: 37311 - protein, 6 aa, synthetic construct
PYECPE

SEQ ID NO: 37312 - protein, 6 aa, synthetic construct
PYECPF

SEQ ID NO: 37313 - protein, 6 aa, synthetic construct
PYECPW

SEQ ID NO: 37314 - protein, 6 aa, synthetic construct
PYECPY

SEQ ID NO: 37315 - protein, 6 aa, synthetic construct
PYECSD

SEQ ID NO: 37316 - protein, 6 aa, synthetic construct
PYECSE

SEQ ID NO: 37317 - protein, 6 aa, synthetic construct
PYECSF

SEQ ID NO: 37318 - protein, 6 aa, synthetic construct
PYECSW

SEQ ID NO: 37319 - protein, 6 aa, synthetic construct
PYECSY

SEQ ID NO: 37320 - protein, 6 aa, synthetic construct
PYECTD

SEQ ID NO: 37321 - protein, 6 aa, synthetic construct
PYECTE

SEQ ID NO: 37322 - protein, 6 aa, synthetic construct
PYECTF

SEQ ID NO: 37323 - protein, 6 aa, synthetic construct
PYECTW

SEQ ID NO: 37324 - protein, 6 aa, synthetic construct
PYECTY

SEQ ID NO: 37325 - protein, 6 aa, synthetic construct
PYECWD

SEQ ID NO: 37326 - protein, 6 aa, synthetic construct
PYECWE

SEQ ID NO: 37327 - protein, 6 aa, synthetic construct
PYECWF

SEQ ID NO: 37328 - protein, 6 aa, synthetic construct
PYECWW

SEQ ID NO: 37329 - protein, 6 aa, synthetic construct
PYECWY

SEQ ID NO: 37330 - protein, 6 aa, synthetic construct
PYECYD

SEQ ID NO: 37331 - protein, 6 aa, synthetic construct
PYECYE

SEQ ID NO: 37332 - protein, 6 aa, synthetic construct
PYECYF

SEQ ID NO: 37333 - protein, 6 aa, synthetic construct
PYECYW

SEQ ID NO: 37334 - protein, 6 aa, synthetic construct
PYECYY

SEQ ID NO: 37335 - protein, 6 aa, synthetic construct
PYECVD

SEQ ID NO: 37336 - protein, 6 aa, synthetic construct
PYECVE

SEQ ID NO: 37337 - protein, 6 aa, synthetic construct
PYECVF

SEQ ID NO: 37338 - protein, 6 aa, synthetic construct
PYECVW

SEQ ID NO: 37339 - protein, 6 aa, synthetic construct
PYECVY

SEQ ID NO: 37340 - protein, 6 aa, synthetic construct
PYEQAD

SEQ ID NO: 37341 - protein, 6 aa, synthetic construct
PYEQAE

SEQ ID NO: 37342 - protein, 6 aa, synthetic construct
PYEQAF

SEQ ID NO: 37343 - protein, 6 aa, synthetic construct
PYEQAW

SEQ ID NO: 37344 - protein, 6 aa, synthetic construct
PYEQAY

SEQ ID NO: 37345 - protein, 6 aa, synthetic construct
PYEQRD

SEQ ID NO: 37346 - protein, 6 aa, synthetic construct
PYEQRE

SEQ ID NO: 37347 - protein, 6 aa, synthetic construct
PYEQRF

SEQ ID NO: 37348 - protein, 6 aa, synthetic construct
PYEQRW

SEQ ID NO: 37349 - protein, 6 aa, synthetic construct
PYEQRY

SEQ ID NO: 37350 - protein, 6 aa, synthetic construct
PYEQND

SEQ ID NO: 37351 - protein, 6 aa, synthetic construct
PYEQNE

SEQ ID NO: 37352 - protein, 6 aa, synthetic construct
PYEQNF

SEQ ID NO: 37353 - protein, 6 aa, synthetic construct
PYEQNW

SEQ ID NO: 37354 - protein, 6 aa, synthetic construct
PYEQNY

SEQ ID NO: 37355 - protein, 6 aa, synthetic construct
PYEQDD

SEQ ID NO: 37356 - protein, 6 aa, synthetic construct
PYEQDE

SEQ ID NO: 37357 - protein, 6 aa, synthetic construct
PYEQDF

SEQ ID NO: 37358 - protein, 6 aa, synthetic construct
PYEQDW

SEQ ID NO: 37359 - protein, 6 aa, synthetic construct
PYEQDY

SEQ ID NO: 37360 - protein, 6 aa, synthetic construct
PYEQCD

SEQ ID NO: 37361 - protein, 6 aa, synthetic construct
PYEQCE

SEQ ID NO: 37362 - protein, 6 aa, synthetic construct
PYEQCF

SEQ ID NO: 37363 - protein, 6 aa, synthetic construct
PYEQCW

SEQ ID NO: 37364 - protein, 6 aa, synthetic construct
PYEQCY

SEQ ID NO: 37365 - protein, 6 aa, synthetic construct
PYEQQD

SEQ ID NO: 37366 - protein, 6 aa, synthetic construct
PYEQQE

SEQ ID NO: 37367 - protein, 6 aa, synthetic construct
PYEQQF

SEQ ID NO: 37368 - protein, 6 aa, synthetic construct
PYEQQW

SEQ ID NO: 37369 - protein, 6 aa, synthetic construct
PYEQQY

SEQ ID NO: 37370 - protein, 6 aa, synthetic construct
PYEQED

SEQ ID NO: 37371 - protein, 6 aa, synthetic construct
PYEQEE

SEQ ID NO: 37372 - protein, 6 aa, synthetic construct
PYEQEF

SEQ ID NO: 37373 - protein, 6 aa, synthetic construct
PYEQEW

SEQ ID NO: 37374 - protein, 6 aa, synthetic construct
PYEQEY

SEQ ID NO: 37375 - protein, 6 aa, synthetic construct
PYEQGD

SEQ ID NO: 37376 - protein, 6 aa, synthetic construct
PYEQGE

SEQ ID NO: 37377 - protein, 6 aa, synthetic construct
PYEQGF

SEQ ID NO: 37378 - protein, 6 aa, synthetic construct
PYEQGW

SEQ ID NO: 37379 - protein, 6 aa, synthetic construct
PYEQGY

SEQ ID NO: 37380 - protein, 6 aa, synthetic construct
PYEQHD

SEQ ID NO: 37381 - protein, 6 aa, synthetic construct
PYEQHE

SEQ ID NO: 37382 - protein, 6 aa, synthetic construct
PYEQHF

SEQ ID NO: 37383 - protein, 6 aa, synthetic construct
PYEQHW

SEQ ID NO: 37384 - protein, 6 aa, synthetic construct
PYEQHY

SEQ ID NO: 37385 - protein, 6 aa, synthetic construct
PYEQID

SEQ ID NO: 37386 - protein, 6 aa, synthetic construct
PYEQIE

SEQ ID NO: 37387 - protein, 6 aa, synthetic construct
PYEQIF

SEQ ID NO: 37388 - protein, 6 aa, synthetic construct
PYEQIW

SEQ ID NO: 37389 - protein, 6 aa, synthetic construct
PYEQIY

SEQ ID NO: 37390 - protein, 6 aa, synthetic construct
PYEQLD

SEQ ID NO: 37391 - protein, 6 aa, synthetic construct
PYEQLE

SEQ ID NO: 37392 - protein, 6 aa, synthetic construct
PYEQLF

SEQ ID NO: 37393 - protein, 6 aa, synthetic construct
PYEQLW

SEQ ID NO: 37394 - protein, 6 aa, synthetic construct
PYEQLY

SEQ ID NO: 37395 - protein, 6 aa, synthetic construct
PYEQKD

SEQ ID NO: 37396 - protein, 6 aa, synthetic construct
PYEQKE

SEQ ID NO: 37397 - protein, 6 aa, synthetic construct
PYEQKF

SEQ ID NO: 37398 - protein, 6 aa, synthetic construct
PYEQKW

SEQ ID NO: 37399 - protein, 6 aa, synthetic construct
PYEQKY

SEQ ID NO: 37400 - protein, 6 aa, synthetic construct
PYEQMD

SEQ ID NO: 37401 - protein, 6 aa, synthetic construct
PYEQME

SEQ ID NO: 37402 - protein, 6 aa, synthetic construct
PYEQMF

SEQ ID NO: 37403 - protein, 6 aa, synthetic construct
PYEQMW

SEQ ID NO: 37404 - protein, 6 aa, synthetic construct
PYEQMY

SEQ ID NO: 37405 - protein, 6 aa, synthetic construct
PYEQFD

SEQ ID NO: 37406 - protein, 6 aa, synthetic construct
PYEQFE

SEQ ID NO: 37407 - protein, 6 aa, synthetic construct
PYEQFF

SEQ ID NO: 37408 - protein, 6 aa, synthetic construct
PYEQFW

SEQ ID NO: 37409 - protein, 6 aa, synthetic construct
PYEQFY

SEQ ID NO: 37410 - protein, 6 aa, synthetic construct
PYEQPD

SEQ ID NO: 37411 - protein, 6 aa, synthetic construct
PYEQPE

SEQ ID NO: 37412 - protein, 6 aa, synthetic construct
PYEQPF

SEQ ID NO: 37413 - protein, 6 aa, synthetic construct
PYEQPW

SEQ ID NO: 37414 - protein, 6 aa, synthetic construct
PYEQPY

SEQ ID NO: 37415 - protein, 6 aa, synthetic construct
PYEQSD

SEQ ID NO: 37416 - protein, 6 aa, synthetic construct
PYEQSE

SEQ ID NO: 37417 - protein, 6 aa, synthetic construct
PYEQSF

SEQ ID NO: 37418 - protein, 6 aa, synthetic construct
PYEQSW

SEQ ID NO: 37419 - protein, 6 aa, synthetic construct
PYEQSY

SEQ ID NO: 37420 - protein, 6 aa, synthetic construct
PYEQTD

SEQ ID NO: 37421 - protein, 6 aa, synthetic construct
PYEQTE

SEQ ID NO: 37422 - protein, 6 aa, synthetic construct
PYEQTF

SEQ ID NO: 37423 - protein, 6 aa, synthetic construct
PYEQTW

SEQ ID NO: 37424 - protein, 6 aa, synthetic construct
PYEQTY

SEQ ID NO: 37425 - protein, 6 aa, synthetic construct
PYEQWD

SEQ ID NO: 37426 - protein, 6 aa, synthetic construct
PYEQWE

SEQ ID NO: 37427 - protein, 6 aa, synthetic construct
PYEQWF

SEQ ID NO: 37428 - protein, 6 aa, synthetic construct
PYEQWW

SEQ ID NO: 37429 - protein, 6 aa, synthetic construct
PYEQWY

SEQ ID NO: 37430 - protein, 6 aa, synthetic construct
PYEQYD

SEQ ID NO: 37431 - protein, 6 aa, synthetic construct
PYEQYE

SEQ ID NO: 37432 - protein, 6 aa, synthetic construct
PYEQYF

SEQ ID NO: 37433 - protein, 6 aa, synthetic construct
PYEQYW

SEQ ID NO: 37434 - protein, 6 aa, synthetic construct
PYEQYY

SEQ ID NO: 37435 - protein, 6 aa, synthetic construct
PYEQVD

SEQ ID NO: 37436 - protein, 6 aa, synthetic construct
PYEQVE

SEQ ID NO: 37437 - protein, 6 aa, synthetic construct
PYEQVF

SEQ ID NO: 37438 - protein, 6 aa, synthetic construct
PYEQVW

SEQ ID NO: 37439 - protein, 6 aa, synthetic construct
PYEQVY

SEQ ID NO: 37440 - protein, 6 aa, synthetic construct
PYEEAD

SEQ ID NO: 37441 - protein, 6 aa, synthetic construct
PYEEAE

SEQ ID NO: 37442 - protein, 6 aa, synthetic construct
PYEEAF

SEQ ID NO: 37443 - protein, 6 aa, synthetic construct
PYEEAW

SEQ ID NO: 37444 - protein, 6 aa, synthetic construct
PYEEAY

SEQ ID NO: 37445 - protein, 6 aa, synthetic construct
PYEERD

SEQ ID NO: 37446 - protein, 6 aa, synthetic construct
PYEERE

SEQ ID NO: 37447 - protein, 6 aa, synthetic construct
PYEERF

SEQ ID NO: 37448 - protein, 6 aa, synthetic construct
PYEERW

SEQ ID NO: 37449 - protein, 6 aa, synthetic construct
PYEERY

SEQ ID NO: 37450 - protein, 6 aa, synthetic construct
PYEEND

SEQ ID NO: 37451 - protein, 6 aa, synthetic construct
PYEENE

SEQ ID NO: 37452 - protein, 6 aa, synthetic construct
PYEENF

SEQ ID NO: 37453 - protein, 6 aa, synthetic construct
PYEENW

SEQ ID NO: 37454 - protein, 6 aa, synthetic construct
PYEENY

SEQ ID NO: 37455 - protein, 6 aa, synthetic construct
PYEEDD

SEQ ID NO: 37456 - protein, 6 aa, synthetic construct
PYEEDE

SEQ ID NO: 37457 - protein, 6 aa, synthetic construct
PYEEDF

SEQ ID NO: 37458 - protein, 6 aa, synthetic construct
PYEEDW

SEQ ID NO: 37459 - protein, 6 aa, synthetic construct
PYEEDY

SEQ ID NO: 37460 - protein, 6 aa, synthetic construct
PYEECD

SEQ ID NO: 37461 - protein, 6 aa, synthetic construct
PYEECE

SEQ ID NO: 37462 - protein, 6 aa, synthetic construct
PYEECF

SEQ ID NO: 37463 - protein, 6 aa, synthetic construct
PYEECW

SEQ ID NO: 37464 - protein, 6 aa, synthetic construct
PYEECY

SEQ ID NO: 37465 - protein, 6 aa, synthetic construct
PYEEQD

SEQ ID NO: 37466 - protein, 6 aa, synthetic construct
PYEEQE

SEQ ID NO: 37467 - protein, 6 aa, synthetic construct
PYEEQF

SEQ ID NO: 37468 - protein, 6 aa, synthetic construct
PYEEQW

SEQ ID NO: 37469 - protein, 6 aa, synthetic construct
PYEEQY

SEQ ID NO: 37470 - protein, 6 aa, synthetic construct
PYEEED

SEQ ID NO: 37471 - protein, 6 aa, synthetic construct
PYEEEE

SEQ ID NO: 37472 - protein, 6 aa, synthetic construct
PYEEEF

SEQ ID NO: 37473 - protein, 6 aa, synthetic construct
PYEEEW

SEQ ID NO: 37474 - protein, 6 aa, synthetic construct
PYEEEY

SEQ ID NO: 37475 - protein, 6 aa, synthetic construct
PYEEGD

SEQ ID NO: 37476 - protein, 6 aa, synthetic construct
PYEEGE

SEQ ID NO: 37477 - protein, 6 aa, synthetic construct
PYEEGF

SEQ ID NO: 37478 - protein, 6 aa, synthetic construct
PYEEGW

SEQ ID NO: 37479 - protein, 6 aa, synthetic construct
PYEEGY

SEQ ID NO: 37480 - protein, 6 aa, synthetic construct
PYEEHD

SEQ ID NO: 37481 - protein, 6 aa, synthetic construct
PYEEHE

SEQ ID NO: 37482 - protein, 6 aa, synthetic construct
PYEEHF

SEQ ID NO: 37483 - protein, 6 aa, synthetic construct
PYEEHW

SEQ ID NO: 37484 - protein, 6 aa, synthetic construct
PYEEHY

SEQ ID NO: 37485 - protein, 6 aa, synthetic construct
PYEEID

SEQ ID NO: 37486 - protein, 6 aa, synthetic construct
PYEEIE

SEQ ID NO: 37487 - protein, 6 aa, synthetic construct
PYEEIF

SEQ ID NO: 37488 - protein, 6 aa, synthetic construct
PYEEIW

SEQ ID NO: 37489 - protein, 6 aa, synthetic construct
PYEEIY

SEQ ID NO: 37490 - protein, 6 aa, synthetic construct
PYEELD

SEQ ID NO: 37491 - protein, 6 aa, synthetic construct
PYEELE

SEQ ID NO: 37492 - protein, 6 aa, synthetic construct
PYEELF

SEQ ID NO: 37493 - protein, 6 aa, synthetic construct
PYEELW

SEQ ID NO: 37494 - protein, 6 aa, synthetic construct
PYEELY

SEQ ID NO: 37495 - protein, 6 aa, synthetic construct
PYEEKD

SEQ ID NO: 37496 - protein, 6 aa, synthetic construct
PYEEKE

SEQ ID NO: 37497 - protein, 6 aa, synthetic construct
PYEEKF

SEQ ID NO: 37498 - protein, 6 aa, synthetic construct
PYEEKW

SEQ ID NO: 37499 - protein, 6 aa, synthetic construct
PYEEKY

SEQ ID NO: 37500 - protein, 6 aa, synthetic construct
PYEEMD

SEQ ID NO: 37501 - protein, 6 aa, synthetic construct
PYEEME

SEQ ID NO: 37502 - protein, 6 aa, synthetic construct
PYEEMF

SEQ ID NO: 37503 - protein, 6 aa, synthetic construct
PYEEMW

SEQ ID NO: 37504 - protein, 6 aa, synthetic construct
PYEEMY

SEQ ID NO: 37505 - protein, 6 aa, synthetic construct
PYEEFD

SEQ ID NO: 37506 - protein, 6 aa, synthetic construct
PYEEFE

SEQ ID NO: 37507 - protein, 6 aa, synthetic construct
PYEEFF

SEQ ID NO: 37508 - protein, 6 aa, synthetic construct
PYEEFW

SEQ ID NO: 37509 - protein, 6 aa, synthetic construct
PYEEFY

SEQ ID NO: 37510 - protein, 6 aa, synthetic construct
PYEEPD

SEQ ID NO: 37511 - protein, 6 aa, synthetic construct
PYEEPE

SEQ ID NO: 37512 - protein, 6 aa, synthetic construct
PYEEPF

SEQ ID NO: 37513 - protein, 6 aa, synthetic construct
PYEEPW

SEQ ID NO: 37514 - protein, 6 aa, synthetic construct
PYEEPY

SEQ ID NO: 37515 - protein, 6 aa, synthetic construct
PYEESD

SEQ ID NO: 37516 - protein, 6 aa, synthetic construct
PYEESE

SEQ ID NO: 37517 - protein, 6 aa, synthetic construct
PYEESF

SEQ ID NO: 37518 - protein, 6 aa, synthetic construct
PYEESW

SEQ ID NO: 37519 - protein, 6 aa, synthetic construct
PYEESY

SEQ ID NO: 37520 - protein, 6 aa, synthetic construct
PYEETD

SEQ ID NO: 37521 - protein, 6 aa, synthetic construct
PYEETE

SEQ ID NO: 37522 - protein, 6 aa, synthetic construct
PYEETF

SEQ ID NO: 37523 - protein, 6 aa, synthetic construct
PYEETW

SEQ ID NO: 37524 - protein, 6 aa, synthetic construct
PYEETY

SEQ ID NO: 37525 - protein, 6 aa, synthetic construct
PYEEWD

SEQ ID NO: 37526 - protein, 6 aa, synthetic construct
PYEEWE

SEQ ID NO: 37527 - protein, 6 aa, synthetic construct
PYEEWF

SEQ ID NO: 37528 - protein, 6 aa, synthetic construct
PYEEWW

SEQ ID NO: 37529 - protein, 6 aa, synthetic construct
PYEEWY

SEQ ID NO: 37530 - protein, 6 aa, synthetic construct
PYEEYD

SEQ ID NO: 37531 - protein, 6 aa, synthetic construct
PYEEYE

SEQ ID NO: 37532 - protein, 6 aa, synthetic construct
PYEEYF

SEQ ID NO: 37533 - protein, 6 aa, synthetic construct
PYEEYW

SEQ ID NO: 37534 - protein, 6 aa, synthetic construct
PYEEYY

SEQ ID NO: 37535 - protein, 6 aa, synthetic construct
PYEEVD

SEQ ID NO: 37536 - protein, 6 aa, synthetic construct
PYEEVE

SEQ ID NO: 37537 - protein, 6 aa, synthetic construct
PYEEVF

SEQ ID NO: 37538 - protein, 6 aa, synthetic construct
PYEEVW

SEQ ID NO: 37539 - protein, 6 aa, synthetic construct
PYEEVY

SEQ ID NO: 37540 - protein, 6 aa, synthetic construct
PYEGAD

SEQ ID NO: 37541 - protein, 6 aa, synthetic construct
PYEGAE

SEQ ID NO: 37542 - protein, 6 aa, synthetic construct
PYEGAF

SEQ ID NO: 37543 - protein, 6 aa, synthetic construct
PYEGAW

SEQ ID NO: 37544 - protein, 6 aa, synthetic construct
PYEGAY

SEQ ID NO: 37545 - protein, 6 aa, synthetic construct
PYEGRD

SEQ ID NO: 37546 - protein, 6 aa, synthetic construct
PYEGRE

SEQ ID NO: 37547 - protein, 6 aa, synthetic construct
PYEGRF

SEQ ID NO: 37548 - protein, 6 aa, synthetic construct
PYEGRW

SEQ ID NO: 37549 - protein, 6 aa, synthetic construct
PYEGRY

SEQ ID NO: 37550 - protein, 6 aa, synthetic construct
PYEGND

SEQ ID NO: 37551 - protein, 6 aa, synthetic construct
PYEGNE

SEQ ID NO: 37552 - protein, 6 aa, synthetic construct
PYEGNF

SEQ ID NO: 37553 - protein, 6 aa, synthetic construct
PYEGNW

SEQ ID NO: 37554 - protein, 6 aa, synthetic construct
PYEGNY

SEQ ID NO: 37555 - protein, 6 aa, synthetic construct
PYEGDD

SEQ ID NO: 37556 - protein, 6 aa, synthetic construct
PYEGDE

SEQ ID NO: 37557 - protein, 6 aa, synthetic construct
PYEGDF

SEQ ID NO: 37558 - protein, 6 aa, synthetic construct
PYEGDW

SEQ ID NO: 37559 - protein, 6 aa, synthetic construct
PYEGDY

SEQ ID NO: 37560 - protein, 6 aa, synthetic construct
PYEGCD

SEQ ID NO: 37561 - protein, 6 aa, synthetic construct
PYEGCE

SEQ ID NO: 37562 - protein, 6 aa, synthetic construct
PYEGCF

SEQ ID NO: 37563 - protein, 6 aa, synthetic construct
PYEGCW

SEQ ID NO: 37564 - protein, 6 aa, synthetic construct
PYEGCY

SEQ ID NO: 37565 - protein, 6 aa, synthetic construct
PYEGQD

SEQ ID NO: 37566 - protein, 6 aa, synthetic construct
PYEGQE

SEQ ID NO: 37567 - protein, 6 aa, synthetic construct
PYEGQF

SEQ ID NO: 37568 - protein, 6 aa, synthetic construct
PYEGQW

SEQ ID NO: 37569 - protein, 6 aa, synthetic construct
PYEGQY

SEQ ID NO: 37570 - protein, 6 aa, synthetic construct
PYEGED

SEQ ID NO: 37571 - protein, 6 aa, synthetic construct
PYEGEE

SEQ ID NO: 37572 - protein, 6 aa, synthetic construct
PYEGEF

SEQ ID NO: 37573 - protein, 6 aa, synthetic construct
PYEGEW

SEQ ID NO: 37574 - protein, 6 aa, synthetic construct
PYEGEY

SEQ ID NO: 37575 - protein, 6 aa, synthetic construct
PYEGGD

SEQ ID NO: 37576 - protein, 6 aa, synthetic construct
PYEGGE

SEQ ID NO: 37577 - protein, 6 aa, synthetic construct
PYEGGF

SEQ ID NO: 37578 - protein, 6 aa, synthetic construct
PYEGGW

SEQ ID NO: 37579 - protein, 6 aa, synthetic construct
PYEGGY

SEQ ID NO: 37580 - protein, 6 aa, synthetic construct
PYEGHD

SEQ ID NO: 37581 - protein, 6 aa, synthetic construct
PYEGHE

SEQ ID NO: 37582 - protein, 6 aa, synthetic construct
PYEGHF

SEQ ID NO: 37583 - protein, 6 aa, synthetic construct
PYEGHW

SEQ ID NO: 37584 - protein, 6 aa, synthetic construct
PYEGHY

SEQ ID NO: 37585 - protein, 6 aa, synthetic construct
PYEGID

SEQ ID NO: 37586 - protein, 6 aa, synthetic construct
PYEGIE

SEQ ID NO: 37587 - protein, 6 aa, synthetic construct
PYEGIF

SEQ ID NO: 37588 - protein, 6 aa, synthetic construct
PYEGIW

SEQ ID NO: 37589 - protein, 6 aa, synthetic construct
PYEGIY

SEQ ID NO: 37590 - protein, 6 aa, synthetic construct
PYEGLD

SEQ ID NO: 37591 - protein, 6 aa, synthetic construct
PYEGLE

SEQ ID NO: 37592 - protein, 6 aa, synthetic construct
PYEGLF

SEQ ID NO: 37593 - protein, 6 aa, synthetic construct
PYEGLW

SEQ ID NO: 37594 - protein, 6 aa, synthetic construct
PYEGLY

SEQ ID NO: 37595 - protein, 6 aa, synthetic construct
PYEGKD

SEQ ID NO: 37596 - protein, 6 aa, synthetic construct
PYEGKE

SEQ ID NO: 37597 - protein, 6 aa, synthetic construct
PYEGKF

SEQ ID NO: 37598 - protein, 6 aa, synthetic construct
PYEGKW

SEQ ID NO: 37599 - protein, 6 aa, synthetic construct
PYEGKY

SEQ ID NO: 37600 - protein, 6 aa, synthetic construct
PYEGMD

SEQ ID NO: 37601 - protein, 6 aa, synthetic construct
PYEGME

SEQ ID NO: 37602 - protein, 6 aa, synthetic construct
PYEGMF

SEQ ID NO: 37603 - protein, 6 aa, synthetic construct
PYEGMW

SEQ ID NO: 37604 - protein, 6 aa, synthetic construct
PYEGMY

SEQ ID NO: 37605 - protein, 6 aa, synthetic construct
PYEGFD

SEQ ID NO: 37606 - protein, 6 aa, synthetic construct
PYEGFE

SEQ ID NO: 37607 - protein, 6 aa, synthetic construct
PYEGFF

SEQ ID NO: 37608 - protein, 6 aa, synthetic construct
PYEGFW

SEQ ID NO: 37609 - protein, 6 aa, synthetic construct
PYEGFY

SEQ ID NO: 37610 - protein, 6 aa, synthetic construct
PYEGPD

SEQ ID NO: 37611 - protein, 6 aa, synthetic construct
PYEGPE

SEQ ID NO: 37612 - protein, 6 aa, synthetic construct
PYEGPF

SEQ ID NO: 37613 - protein, 6 aa, synthetic construct
PYEGPW

SEQ ID NO: 37614 - protein, 6 aa, synthetic construct
PYEGPY

SEQ ID NO: 37615 - protein, 6 aa, synthetic construct
PYEGSD

SEQ ID NO: 37616 - protein, 6 aa, synthetic construct
PYEGSE

SEQ ID NO: 37617 - protein, 6 aa, synthetic construct
PYEGSF

SEQ ID NO: 37618 - protein, 6 aa, synthetic construct
PYEGSW

SEQ ID NO: 37619 - protein, 6 aa, synthetic construct
PYEGSY

SEQ ID NO: 37620 - protein, 6 aa, synthetic construct
PYEGTD

SEQ ID NO: 37621 - protein, 6 aa, synthetic construct
PYEGTE

SEQ ID NO: 37622 - protein, 6 aa, synthetic construct
PYEGTF

SEQ ID NO: 37623 - protein, 6 aa, synthetic construct
PYEGTW

SEQ ID NO: 37624 - protein, 6 aa, synthetic construct
PYEGTY

SEQ ID NO: 37625 - protein, 6 aa, synthetic construct
PYEGWD

SEQ ID NO: 37626 - protein, 6 aa, synthetic construct
PYEGWE

SEQ ID NO: 37627 - protein, 6 aa, synthetic construct
PYEGWF

SEQ ID NO: 37628 - protein, 6 aa, synthetic construct
PYEGWW

SEQ ID NO: 37629 - protein, 6 aa, synthetic construct
PYEGWY

SEQ ID NO: 37630 - protein, 6 aa, synthetic construct
PYEGYD

SEQ ID NO: 37631 - protein, 6 aa, synthetic construct
PYEGYE

SEQ ID NO: 37632 - protein, 6 aa, synthetic construct
PYEGYF

SEQ ID NO: 37633 - protein, 6 aa, synthetic construct
PYEGYW

SEQ ID NO: 37634 - protein, 6 aa, synthetic construct
PYEGYY

SEQ ID NO: 37635 - protein, 6 aa, synthetic construct
PYEGVD

SEQ ID NO: 37636 - protein, 6 aa, synthetic construct
PYEGVE

SEQ ID NO: 37637 - protein, 6 aa, synthetic construct
PYEGVF

SEQ ID NO: 37638 - protein, 6 aa, synthetic construct
PYEGVW

SEQ ID NO: 37639 - protein, 6 aa, synthetic construct
PYEGVY

SEQ ID NO: 37640 - protein, 6 aa, synthetic construct
PYEHAD

SEQ ID NO: 37641 - protein, 6 aa, synthetic construct
PYEHAE

SEQ ID NO: 37642 - protein, 6 aa, synthetic construct
PYEHAF

SEQ ID NO: 37643 - protein, 6 aa, synthetic construct
PYEHAW

SEQ ID NO: 37644 - protein, 6 aa, synthetic construct
PYEHAY

SEQ ID NO: 37645 - protein, 6 aa, synthetic construct
PYEHRD

SEQ ID NO: 37646 - protein, 6 aa, synthetic construct
PYEHRE

SEQ ID NO: 37647 - protein, 6 aa, synthetic construct
PYEHRF

SEQ ID NO: 37648 - protein, 6 aa, synthetic construct
PYEHRW

SEQ ID NO: 37649 - protein, 6 aa, synthetic construct
PYEHRY

SEQ ID NO: 37650 - protein, 6 aa, synthetic construct
PYEHND

SEQ ID NO: 37651 - protein, 6 aa, synthetic construct
PYEHNE

SEQ ID NO: 37652 - protein, 6 aa, synthetic construct
PYEHNF

SEQ ID NO: 37653 - protein, 6 aa, synthetic construct
PYEHNW

SEQ ID NO: 37654 - protein, 6 aa, synthetic construct
PYEHNY

SEQ ID NO: 37655 - protein, 6 aa, synthetic construct
PYEHDD

SEQ ID NO: 37656 - protein, 6 aa, synthetic construct
PYEHDE

SEQ ID NO: 37657 - protein, 6 aa, synthetic construct
PYEHDF

SEQ ID NO: 37658 - protein, 6 aa, synthetic construct
PYEHDW

SEQ ID NO: 37659 - protein, 6 aa, synthetic construct
PYEHDY

SEQ ID NO: 37660 - protein, 6 aa, synthetic construct
PYEHCD

SEQ ID NO: 37661 - protein, 6 aa, synthetic construct
PYEHCE

SEQ ID NO: 37662 - protein, 6 aa, synthetic construct
PYEHCF

SEQ ID NO: 37663 - protein, 6 aa, synthetic construct
PYEHCW

SEQ ID NO: 37664 - protein, 6 aa, synthetic construct
PYEHCY

SEQ ID NO: 37665 - protein, 6 aa, synthetic construct
PYEHQD

SEQ ID NO: 37666 - protein, 6 aa, synthetic construct
PYEHQE

SEQ ID NO: 37667 - protein, 6 aa, synthetic construct
PYEHQF

SEQ ID NO: 37668 - protein, 6 aa, synthetic construct
PYEHQW

SEQ ID NO: 37669 - protein, 6 aa, synthetic construct
PYEHQY

SEQ ID NO: 37670 - protein, 6 aa, synthetic construct
PYEHED

SEQ ID NO: 37671 - protein, 6 aa, synthetic construct
PYEHEE

SEQ ID NO: 37672 - protein, 6 aa, synthetic construct
PYEHEF

SEQ ID NO: 37673 - protein, 6 aa, synthetic construct
PYEHEW

SEQ ID NO: 37674 - protein, 6 aa, synthetic construct
PYEHEY

SEQ ID NO: 37675 - protein, 6 aa, synthetic construct
PYEHGD

SEQ ID NO: 37676 - protein, 6 aa, synthetic construct
PYEHGE

SEQ ID NO: 37677 - protein, 6 aa, synthetic construct
PYEHGF

SEQ ID NO: 37678 - protein, 6 aa, synthetic construct
PYEHGW

SEQ ID NO: 37679 - protein, 6 aa, synthetic construct
PYEHGY

SEQ ID NO: 37680 - protein, 6 aa, synthetic construct
PYEHHD

SEQ ID NO: 37681 - protein, 6 aa, synthetic construct
PYEHHE

SEQ ID NO: 37682 - protein, 6 aa, synthetic construct
PYEHHF

SEQ ID NO: 37683 - protein, 6 aa, synthetic construct
PYEHHW

SEQ ID NO: 37684 - protein, 6 aa, synthetic construct
PYEHHY

SEQ ID NO: 37685 - protein, 6 aa, synthetic construct
PYEHID

SEQ ID NO: 37686 - protein, 6 aa, synthetic construct
PYEHIE

SEQ ID NO: 37687 - protein, 6 aa, synthetic construct
PYEHIF

SEQ ID NO: 37688 - protein, 6 aa, synthetic construct
PYEHIW

SEQ ID NO: 37689 - protein, 6 aa, synthetic construct
PYEHIY

SEQ ID NO: 37690 - protein, 6 aa, synthetic construct
PYEHLD

SEQ ID NO: 37691 - protein, 6 aa, synthetic construct
PYEHLE

SEQ ID NO: 37692 - protein, 6 aa, synthetic construct
PYEHLF

SEQ ID NO: 37693 - protein, 6 aa, synthetic construct
PYEHLW

SEQ ID NO: 37694 - protein, 6 aa, synthetic construct
PYEHLY

SEQ ID NO: 37695 - protein, 6 aa, synthetic construct
PYEHKD

SEQ ID NO: 37696 - protein, 6 aa, synthetic construct
PYEHKE

SEQ ID NO: 37697 - protein, 6 aa, synthetic construct
PYEHKF

SEQ ID NO: 37698 - protein, 6 aa, synthetic construct
PYEHKW

SEQ ID NO: 37699 - protein, 6 aa, synthetic construct
PYEHKY

SEQ ID NO: 37700 - protein, 6 aa, synthetic construct
PYEHMD

SEQ ID NO: 37701 - protein, 6 aa, synthetic construct
PYEHME

SEQ ID NO: 37702 - protein, 6 aa, synthetic construct
PYEHMF

SEQ ID NO: 37703 - protein, 6 aa, synthetic construct
PYEHMW

SEQ ID NO: 37704 - protein, 6 aa, synthetic construct
PYEHMY

SEQ ID NO: 37705 - protein, 6 aa, synthetic construct
PYEHFD

SEQ ID NO: 37706 - protein, 6 aa, synthetic construct
PYEHFE

SEQ ID NO: 37707 - protein, 6 aa, synthetic construct
PYEHFF

SEQ ID NO: 37708 - protein, 6 aa, synthetic construct
PYEHFW

SEQ ID NO: 37709 - protein, 6 aa, synthetic construct
PYEHFY

SEQ ID NO: 37710 - protein, 6 aa, synthetic construct
PYEHPD

SEQ ID NO: 37711 - protein, 6 aa, synthetic construct
PYEHPE

SEQ ID NO: 37712 - protein, 6 aa, synthetic construct
PYEHPF

SEQ ID NO: 37713 - protein, 6 aa, synthetic construct
PYEHPW

SEQ ID NO: 37714 - protein, 6 aa, synthetic construct
PYEHPY

SEQ ID NO: 37715 - protein, 6 aa, synthetic construct
PYEHSD

SEQ ID NO: 37716 - protein, 6 aa, synthetic construct
PYEHSE

SEQ ID NO: 37717 - protein, 6 aa, synthetic construct
PYEHSF

SEQ ID NO: 37718 - protein, 6 aa, synthetic construct
PYEHSW

SEQ ID NO: 37719 - protein, 6 aa, synthetic construct
PYEHSY

SEQ ID NO: 37720 - protein, 6 aa, synthetic construct
PYEHTD

SEQ ID NO: 37721 - protein, 6 aa, synthetic construct
PYEHTE

SEQ ID NO: 37722 - protein, 6 aa, synthetic construct
PYEHTF

SEQ ID NO: 37723 - protein, 6 aa, synthetic construct
PYEHTW

SEQ ID NO: 37724 - protein, 6 aa, synthetic construct
PYEHTY

SEQ ID NO: 37725 - protein, 6 aa, synthetic construct
PYEHWD

SEQ ID NO: 37726 - protein, 6 aa, synthetic construct
PYEHWE

SEQ ID NO: 37727 - protein, 6 aa, synthetic construct
PYEHWF

SEQ ID NO: 37728 - protein, 6 aa, synthetic construct
PYEHWW

SEQ ID NO: 37729 - protein, 6 aa, synthetic construct
PYEHWY

SEQ ID NO: 37730 - protein, 6 aa, synthetic construct
PYEHYD

SEQ ID NO: 37731 - protein, 6 aa, synthetic construct
PYEHYE

SEQ ID NO: 37732 - protein, 6 aa, synthetic construct
PYEHYF

SEQ ID NO: 37733 - protein, 6 aa, synthetic construct
PYEHYW

SEQ ID NO: 37734 - protein, 6 aa, synthetic construct
PYEHYY

SEQ ID NO: 37735 - protein, 6 aa, synthetic construct
PYEHVD

SEQ ID NO: 37736 - protein, 6 aa, synthetic construct
PYEHVE

SEQ ID NO: 37737 - protein, 6 aa, synthetic construct
PYEHVF

SEQ ID NO: 37738 - protein, 6 aa, synthetic construct
PYEHVW

SEQ ID NO: 37739 - protein, 6 aa, synthetic construct
PYEHVY

SEQ ID NO: 37740 - protein, 6 aa, synthetic construct
PYEIAD

SEQ ID NO: 37741 - protein, 6 aa, synthetic construct
PYEIAE

SEQ ID NO: 37742 - protein, 6 aa, synthetic construct
PYEIAF

SEQ ID NO: 37743 - protein, 6 aa, synthetic construct
PYEIAW

SEQ ID NO: 37744 - protein, 6 aa, synthetic construct
PYEIAY

SEQ ID NO: 37745 - protein, 6 aa, synthetic construct
PYEIRD

SEQ ID NO: 37746 - protein, 6 aa, synthetic construct
PYEIRE

SEQ ID NO: 37747 - protein, 6 aa, synthetic construct
PYEIRF

SEQ ID NO: 37748 - protein, 6 aa, synthetic construct
PYEIRW

SEQ ID NO: 37749 - protein, 6 aa, synthetic construct
PYEIRY

SEQ ID NO: 37750 - protein, 6 aa, synthetic construct
PYEIND

SEQ ID NO: 37751 - protein, 6 aa, synthetic construct
PYEINE

SEQ ID NO: 37752 - protein, 6 aa, synthetic construct
PYEINF

SEQ ID NO: 37753 - protein, 6 aa, synthetic construct
PYEINW

SEQ ID NO: 37754 - protein, 6 aa, synthetic construct
PYEINY

SEQ ID NO: 37755 - protein, 6 aa, synthetic construct
PYEIDD

SEQ ID NO: 37756 - protein, 6 aa, synthetic construct
PYEIDE

SEQ ID NO: 37757 - protein, 6 aa, synthetic construct
PYEIDF

SEQ ID NO: 37758 - protein, 6 aa, synthetic construct
PYEIDW

SEQ ID NO: 37759 - protein, 6 aa, synthetic construct
PYEIDY

SEQ ID NO: 37760 - protein, 6 aa, synthetic construct
PYEICD

SEQ ID NO: 37761 - protein, 6 aa, synthetic construct
PYEICE

SEQ ID NO: 37762 - protein, 6 aa, synthetic construct
PYEICF

SEQ ID NO: 37763 - protein, 6 aa, synthetic construct
PYEICW

SEQ ID NO: 37764 - protein, 6 aa, synthetic construct
PYEICY

SEQ ID NO: 37765 - protein, 6 aa, synthetic construct
PYEIQD

SEQ ID NO: 37766 - protein, 6 aa, synthetic construct
PYEIQE

SEQ ID NO: 37767 - protein, 6 aa, synthetic construct
PYEIQF

SEQ ID NO: 37768 - protein, 6 aa, synthetic construct
PYEIQW

SEQ ID NO: 37769 - protein, 6 aa, synthetic construct
PYEIQY

SEQ ID NO: 37770 - protein, 6 aa, synthetic construct
PYEIED

SEQ ID NO: 37771 - protein, 6 aa, synthetic construct
PYEIEE

SEQ ID NO: 37772 - protein, 6 aa, synthetic construct
PYEIEF

SEQ ID NO: 37773 - protein, 6 aa, synthetic construct
PYEIEW

SEQ ID NO: 37774 - protein, 6 aa, synthetic construct
PYEIEY

SEQ ID NO: 37775 - protein, 6 aa, synthetic construct
PYEIGD

SEQ ID NO: 37776 - protein, 6 aa, synthetic construct
PYEIGE

SEQ ID NO: 37777 - protein, 6 aa, synthetic construct
PYEIGF

SEQ ID NO: 37778 - protein, 6 aa, synthetic construct
PYEIGW

SEQ ID NO: 37779 - protein, 6 aa, synthetic construct
PYEIGY

SEQ ID NO: 37780 - protein, 6 aa, synthetic construct
PYEIHD

SEQ ID NO: 37781 - protein, 6 aa, synthetic construct
PYEIHE

SEQ ID NO: 37782 - protein, 6 aa, synthetic construct
PYEIHF

SEQ ID NO: 37783 - protein, 6 aa, synthetic construct
PYEIHW

SEQ ID NO: 37784 - protein, 6 aa, synthetic construct
PYEIHY

SEQ ID NO: 37785 - protein, 6 aa, synthetic construct
PYEIID

SEQ ID NO: 37786 - protein, 6 aa, synthetic construct
PYEIIE

SEQ ID NO: 37787 - protein, 6 aa, synthetic construct
PYEIIF

SEQ ID NO: 37788 - protein, 6 aa, synthetic construct
PYEIIW

SEQ ID NO: 37789 - protein, 6 aa, synthetic construct
PYEIIY

SEQ ID NO: 37790 - protein, 6 aa, synthetic construct
PYEILD

SEQ ID NO: 37791 - protein, 6 aa, synthetic construct
PYEILE

SEQ ID NO: 37792 - protein, 6 aa, synthetic construct
PYEILF

SEQ ID NO: 37793 - protein, 6 aa, synthetic construct
PYEILW

SEQ ID NO: 37794 - protein, 6 aa, synthetic construct
PYEILY

SEQ ID NO: 37795 - protein, 6 aa, synthetic construct
PYEIKD

SEQ ID NO: 37796 - protein, 6 aa, synthetic construct
PYEIKE

SEQ ID NO: 37797 - protein, 6 aa, synthetic construct
PYEIKF

SEQ ID NO: 37798 - protein, 6 aa, synthetic construct
PYEIKW

SEQ ID NO: 37799 - protein, 6 aa, synthetic construct
PYEIKY

SEQ ID NO: 37800 - protein, 6 aa, synthetic construct
PYEIMD

SEQ ID NO: 37801 - protein, 6 aa, synthetic construct
PYEIME

SEQ ID NO: 37802 - protein, 6 aa, synthetic construct
PYEIMF

SEQ ID NO: 37803 - protein, 6 aa, synthetic construct
PYEIMW

SEQ ID NO: 37804 - protein, 6 aa, synthetic construct
PYEIMY

SEQ ID NO: 37805 - protein, 6 aa, synthetic construct
PYEIFD

SEQ ID NO: 37806 - protein, 6 aa, synthetic construct
PYEIFE

SEQ ID NO: 37807 - protein, 6 aa, synthetic construct
PYEIFF

SEQ ID NO: 37808 - protein, 6 aa, synthetic construct
PYEIFW

SEQ ID NO: 37809 - protein, 6 aa, synthetic construct
PYEIFY

SEQ ID NO: 37810 - protein, 6 aa, synthetic construct
PYEIPD

SEQ ID NO: 37811 - protein, 6 aa, synthetic construct
PYEIPE

SEQ ID NO: 37812 - protein, 6 aa, synthetic construct
PYEIPF

SEQ ID NO: 37813 - protein, 6 aa, synthetic construct
PYEIPW

SEQ ID NO: 37814 - protein, 6 aa, synthetic construct
PYEIPY

SEQ ID NO: 37815 - protein, 6 aa, synthetic construct
PYEISD

SEQ ID NO: 37816 - protein, 6 aa, synthetic construct
PYEISE

SEQ ID NO: 37817 - protein, 6 aa, synthetic construct
PYEISF

SEQ ID NO: 37818 - protein, 6 aa, synthetic construct
PYEISW

SEQ ID NO: 37819 - protein, 6 aa, synthetic construct
PYEISY

SEQ ID NO: 37820 - protein, 6 aa, synthetic construct
PYEITD

SEQ ID NO: 37821 - protein, 6 aa, synthetic construct
PYEITE

SEQ ID NO: 37822 - protein, 6 aa, synthetic construct
PYEITF

SEQ ID NO: 37823 - protein, 6 aa, synthetic construct
PYEITW

SEQ ID NO: 37824 - protein, 6 aa, synthetic construct
PYEITY

SEQ ID NO: 37825 - protein, 6 aa, synthetic construct
PYEIWD

SEQ ID NO: 37826 - protein, 6 aa, synthetic construct
PYEIWE

SEQ ID NO: 37827 - protein, 6 aa, synthetic construct
PYEIWF

SEQ ID NO: 37828 - protein, 6 aa, synthetic construct
PYEIWW

SEQ ID NO: 37829 - protein, 6 aa, synthetic construct
PYEIWY

SEQ ID NO: 37830 - protein, 6 aa, synthetic construct
PYEIYD

SEQ ID NO: 37831 - protein, 6 aa, synthetic construct
PYEIYE

SEQ ID NO: 37832 - protein, 6 aa, synthetic construct
PYEIYF

SEQ ID NO: 37833 - protein, 6 aa, synthetic construct
PYEIYW

SEQ ID NO: 37834 - protein, 6 aa, synthetic construct
PYEIYY

SEQ ID NO: 37835 - protein, 6 aa, synthetic construct
PYEIVD

SEQ ID NO: 37836 - protein, 6 aa, synthetic construct
PYEIVE

SEQ ID NO: 37837 - protein, 6 aa, synthetic construct
PYEIVF

SEQ ID NO: 37838 - protein, 6 aa, synthetic construct
PYEIVW

SEQ ID NO: 37839 - protein, 6 aa, synthetic construct
PYEIVY

SEQ ID NO: 37840 - protein, 6 aa, synthetic construct
PYELAD

SEQ ID NO: 37841 - protein, 6 aa, synthetic construct
PYELAE

SEQ ID NO: 37842 - protein, 6 aa, synthetic construct
PYELAF

SEQ ID NO: 37843 - protein, 6 aa, synthetic construct
PYELAW

SEQ ID NO: 37844 - protein, 6 aa, synthetic construct
PYELAY

SEQ ID NO: 37845 - protein, 6 aa, synthetic construct
PYELRD

SEQ ID NO: 37846 - protein, 6 aa, synthetic construct
PYELRE

SEQ ID NO: 37847 - protein, 6 aa, synthetic construct
PYELRF

SEQ ID NO: 37848 - protein, 6 aa, synthetic construct
PYELRW

SEQ ID NO: 37849 - protein, 6 aa, synthetic construct
PYELRY

SEQ ID NO: 37850 - protein, 6 aa, synthetic construct
PYELND

SEQ ID NO: 37851 - protein, 6 aa, synthetic construct
PYELNE

SEQ ID NO: 37852 - protein, 6 aa, synthetic construct
PYELNF

SEQ ID NO: 37853 - protein, 6 aa, synthetic construct
PYELNW

SEQ ID NO: 37854 - protein, 6 aa, synthetic construct
PYELNY

SEQ ID NO: 37855 - protein, 6 aa, synthetic construct
PYELDD

SEQ ID NO: 37856 - protein, 6 aa, synthetic construct
PYELDE

SEQ ID NO: 37857 - protein, 6 aa, synthetic construct
PYELDF

SEQ ID NO: 37858 - protein, 6 aa, synthetic construct
PYELDW

SEQ ID NO: 37859 - protein, 6 aa, synthetic construct
PYELDY

SEQ ID NO: 37860 - protein, 6 aa, synthetic construct
PYELCD

SEQ ID NO: 37861 - protein, 6 aa, synthetic construct
PYELCE

SEQ ID NO: 37862 - protein, 6 aa, synthetic construct
PYELCF

SEQ ID NO: 37863 - protein, 6 aa, synthetic construct
PYELCW

SEQ ID NO: 37864 - protein, 6 aa, synthetic construct
PYELCY

SEQ ID NO: 37865 - protein, 6 aa, synthetic construct
PYELQD

SEQ ID NO: 37866 - protein, 6 aa, synthetic construct
PYELQE

SEQ ID NO: 37867 - protein, 6 aa, synthetic construct
PYELQF

SEQ ID NO: 37868 - protein, 6 aa, synthetic construct
PYELQW

SEQ ID NO: 37869 - protein, 6 aa, synthetic construct
PYELQY

SEQ ID NO: 37870 - protein, 6 aa, synthetic construct
PYELED

SEQ ID NO: 37871 - protein, 6 aa, synthetic construct
PYELEE

SEQ ID NO: 37872 - protein, 6 aa, synthetic construct
PYELEF

SEQ ID NO: 37873 - protein, 6 aa, synthetic construct
PYELEW

SEQ ID NO: 37874 - protein, 6 aa, synthetic construct
PYELEY

SEQ ID NO: 37875 - protein, 6 aa, synthetic construct
PYELGD

SEQ ID NO: 37876 - protein, 6 aa, synthetic construct
PYELGE

SEQ ID NO: 37877 - protein, 6 aa, synthetic construct
PYELGF

SEQ ID NO: 37878 - protein, 6 aa, synthetic construct
PYELGW

SEQ ID NO: 37879 - protein, 6 aa, synthetic construct
PYELGY

SEQ ID NO: 37880 - protein, 6 aa, synthetic construct
PYELHD

SEQ ID NO: 37881 - protein, 6 aa, synthetic construct
PYELHE

SEQ ID NO: 37882 - protein, 6 aa, synthetic construct
PYELHF

SEQ ID NO: 37883 - protein, 6 aa, synthetic construct
PYELHW

SEQ ID NO: 37884 - protein, 6 aa, synthetic construct
PYELHY

SEQ ID NO: 37885 - protein, 6 aa, synthetic construct
PYELID

SEQ ID NO: 37886 - protein, 6 aa, synthetic construct
PYELIE

SEQ ID NO: 37887 - protein, 6 aa, synthetic construct
PYELIF

SEQ ID NO: 37888 - protein, 6 aa, synthetic construct
PYELIW

SEQ ID NO: 37889 - protein, 6 aa, synthetic construct
PYELIY

SEQ ID NO: 37890 - protein, 6 aa, synthetic construct
PYELLD

SEQ ID NO: 37891 - protein, 6 aa, synthetic construct
PYELLE

SEQ ID NO: 37892 - protein, 6 aa, synthetic construct
PYELLF

SEQ ID NO: 37893 - protein, 6 aa, synthetic construct
PYELLW

SEQ ID NO: 37894 - protein, 6 aa, synthetic construct
PYELLY

SEQ ID NO: 37895 - protein, 6 aa, synthetic construct
PYELKD

SEQ ID NO: 37896 - protein, 6 aa, synthetic construct
PYELKE

SEQ ID NO: 37897 - protein, 6 aa, synthetic construct
PYELKF

SEQ ID NO: 37898 - protein, 6 aa, synthetic construct
PYELKW

SEQ ID NO: 37899 - protein, 6 aa, synthetic construct
PYELKY

SEQ ID NO: 37900 - protein, 6 aa, synthetic construct
PYELMD

SEQ ID NO: 37901 - protein, 6 aa, synthetic construct
PYELME

SEQ ID NO: 37902 - protein, 6 aa, synthetic construct
PYELMF

SEQ ID NO: 37903 - protein, 6 aa, synthetic construct
PYELMW

SEQ ID NO: 37904 - protein, 6 aa, synthetic construct
PYELMY

SEQ ID NO: 37905 - protein, 6 aa, synthetic construct
PYELFD

SEQ ID NO: 37906 - protein, 6 aa, synthetic construct
PYELFE

SEQ ID NO: 37907 - protein, 6 aa, synthetic construct
PYELFF

SEQ ID NO: 37908 - protein, 6 aa, synthetic construct
PYELFW

SEQ ID NO: 37909 - protein, 6 aa, synthetic construct
PYELFY

SEQ ID NO: 37910 - protein, 6 aa, synthetic construct
PYELPD

SEQ ID NO: 37911 - protein, 6 aa, synthetic construct
PYELPE

SEQ ID NO: 37912 - protein, 6 aa, synthetic construct
PYELPF

SEQ ID NO: 37913 - protein, 6 aa, synthetic construct
PYELPW

SEQ ID NO: 37914 - protein, 6 aa, synthetic construct
PYELPY

SEQ ID NO: 37915 - protein, 6 aa, synthetic construct
PYELSD

SEQ ID NO: 37916 - protein, 6 aa, synthetic construct
PYELSE

SEQ ID NO: 37917 - protein, 6 aa, synthetic construct
PYELSF

SEQ ID NO: 37918 - protein, 6 aa, synthetic construct
PYELSW

SEQ ID NO: 37919 - protein, 6 aa, synthetic construct
PYELSY

SEQ ID NO: 37920 - protein, 6 aa, synthetic construct
PYELTD

SEQ ID NO: 37921 - protein, 6 aa, synthetic construct
PYELTE

SEQ ID NO: 37922 - protein, 6 aa, synthetic construct
PYELTF

SEQ ID NO: 37923 - protein, 6 aa, synthetic construct
PYELTW

SEQ ID NO: 37924 - protein, 6 aa, synthetic construct
PYELTY

SEQ ID NO: 37925 - protein, 6 aa, synthetic construct
PYELWD

SEQ ID NO: 37926 - protein, 6 aa, synthetic construct
PYELWE

SEQ ID NO: 37927 - protein, 6 aa, synthetic construct
PYELWF

SEQ ID NO: 37928 - protein, 6 aa, synthetic construct
PYELWW

SEQ ID NO: 37929 - protein, 6 aa, synthetic construct
PYELWY

SEQ ID NO: 37930 - protein, 6 aa, synthetic construct
PYELYD

SEQ ID NO: 37931 - protein, 6 aa, synthetic construct
PYELYE

SEQ ID NO: 37932 - protein, 6 aa, synthetic construct
PYELYF

SEQ ID NO: 37933 - protein, 6 aa, synthetic construct
PYELYW

SEQ ID NO: 37934 - protein, 6 aa, synthetic construct
PYELYY

SEQ ID NO: 37935 - protein, 6 aa, synthetic construct
PYELVD

SEQ ID NO: 37936 - protein, 6 aa, synthetic construct
PYELVE

SEQ ID NO: 37937 - protein, 6 aa, synthetic construct
PYELVF

SEQ ID NO: 37938 - protein, 6 aa, synthetic construct
PYELVW

SEQ ID NO: 37939 - protein, 6 aa, synthetic construct
PYELVY

SEQ ID NO: 37940 - protein, 6 aa, synthetic construct
PYEKAD

SEQ ID NO: 37941 - protein, 6 aa, synthetic construct
PYEKAE

SEQ ID NO: 37942 - protein, 6 aa, synthetic construct
PYEKAF

SEQ ID NO: 37943 - protein, 6 aa, synthetic construct
PYEKAW

SEQ ID NO: 37944 - protein, 6 aa, synthetic construct
PYEKAY

SEQ ID NO: 37945 - protein, 6 aa, synthetic construct
PYEKRD

SEQ ID NO: 37946 - protein, 6 aa, synthetic construct
PYEKRE

SEQ ID NO: 37947 - protein, 6 aa, synthetic construct
PYEKRF

SEQ ID NO: 37948 - protein, 6 aa, synthetic construct
PYEKRW

SEQ ID NO: 37949 - protein, 6 aa, synthetic construct
PYEKRY

SEQ ID NO: 37950 - protein, 6 aa, synthetic construct
PYEKND

SEQ ID NO: 37951 - protein, 6 aa, synthetic construct
PYEKNE

SEQ ID NO: 37952 - protein, 6 aa, synthetic construct
PYEKNF

SEQ ID NO: 37953 - protein, 6 aa, synthetic construct
PYEKNW

SEQ ID NO: 37954 - protein, 6 aa, synthetic construct
PYEKNY

SEQ ID NO: 37955 - protein, 6 aa, synthetic construct
PYEKDD

SEQ ID NO: 37956 - protein, 6 aa, synthetic construct
PYEKDE

SEQ ID NO: 37957 - protein, 6 aa, synthetic construct
PYEKDF

SEQ ID NO: 37958 - protein, 6 aa, synthetic construct
PYEKDW

SEQ ID NO: 37959 - protein, 6 aa, synthetic construct
PYEKDY

SEQ ID NO: 37960 - protein, 6 aa, synthetic construct
PYEKCD

SEQ ID NO: 37961 - protein, 6 aa, synthetic construct
PYEKCE

SEQ ID NO: 37962 - protein, 6 aa, synthetic construct
PYEKCF

SEQ ID NO: 37963 - protein, 6 aa, synthetic construct
PYEKCW

SEQ ID NO: 37964 - protein, 6 aa, synthetic construct
PYEKCY

SEQ ID NO: 37965 - protein, 6 aa, synthetic construct
PYEKQD

SEQ ID NO: 37966 - protein, 6 aa, synthetic construct
PYEKQE

SEQ ID NO: 37967 - protein, 6 aa, synthetic construct
PYEKQF

SEQ ID NO: 37968 - protein, 6 aa, synthetic construct
PYEKQW

SEQ ID NO: 37969 - protein, 6 aa, synthetic construct
PYEKQY

SEQ ID NO: 37970 - protein, 6 aa, synthetic construct
PYEKED

SEQ ID NO: 37971 - protein, 6 aa, synthetic construct
PYEKEE

SEQ ID NO: 37972 - protein, 6 aa, synthetic construct
PYEKEF

SEQ ID NO: 37973 - protein, 6 aa, synthetic construct
PYEKEW

SEQ ID NO: 37974 - protein, 6 aa, synthetic construct
PYEKEY

SEQ ID NO: 37975 - protein, 6 aa, synthetic construct
PYEKGD

SEQ ID NO: 37976 - protein, 6 aa, synthetic construct
PYEKGE

SEQ ID NO: 37977 - protein, 6 aa, synthetic construct
PYEKGF

SEQ ID NO: 37978 - protein, 6 aa, synthetic construct
PYEKGW

SEQ ID NO: 37979 - protein, 6 aa, synthetic construct
PYEKGY

SEQ ID NO: 37980 - protein, 6 aa, synthetic construct
PYEKHD

SEQ ID NO: 37981 - protein, 6 aa, synthetic construct
PYEKHE

SEQ ID NO: 37982 - protein, 6 aa, synthetic construct
PYEKHF

SEQ ID NO: 37983 - protein, 6 aa, synthetic construct
PYEKHW

SEQ ID NO: 37984 - protein, 6 aa, synthetic construct
PYEKHY

SEQ ID NO: 37985 - protein, 6 aa, synthetic construct
PYEKID

SEQ ID NO: 37986 - protein, 6 aa, synthetic construct
PYEKIE

SEQ ID NO: 37987 - protein, 6 aa, synthetic construct
PYEKIF

SEQ ID NO: 37988 - protein, 6 aa, synthetic construct
PYEKIW

SEQ ID NO: 37989 - protein, 6 aa, synthetic construct
PYEKIY

SEQ ID NO: 37990 - protein, 6 aa, synthetic construct
PYEKLD

SEQ ID NO: 37991 - protein, 6 aa, synthetic construct
PYEKLE

SEQ ID NO: 37992 - protein, 6 aa, synthetic construct
PYEKLF

SEQ ID NO: 37993 - protein, 6 aa, synthetic construct
PYEKLW

SEQ ID NO: 37994 - protein, 6 aa, synthetic construct
PYEKLY

SEQ ID NO: 37995 - protein, 6 aa, synthetic construct
PYEKKD

SEQ ID NO: 37996 - protein, 6 aa, synthetic construct
PYEKKE

SEQ ID NO: 37997 - protein, 6 aa, synthetic construct
PYEKKF

SEQ ID NO: 37998 - protein, 6 aa, synthetic construct
PYEKKW

SEQ ID NO: 37999 - protein, 6 aa, synthetic construct
PYEKKY

SEQ ID NO: 38000 - protein, 6 aa, synthetic construct
PYEKMD

SEQ ID NO: 38001 - protein, 6 aa, synthetic construct
PYEKME

SEQ ID NO: 38002 - protein, 6 aa, synthetic construct
PYEKMF

SEQ ID NO: 38003 - protein, 6 aa, synthetic construct
PYEKMW

SEQ ID NO: 38004 - protein, 6 aa, synthetic construct
PYEKMY

SEQ ID NO: 38005 - protein, 6 aa, synthetic construct
PYEKFD

SEQ ID NO: 38006 - protein, 6 aa, synthetic construct
PYEKFE

SEQ ID NO: 38007 - protein, 6 aa, synthetic construct
PYEKFF

SEQ ID NO: 38008 - protein, 6 aa, synthetic construct
PYEKFW

SEQ ID NO: 38009 - protein, 6 aa, synthetic construct
PYEKFY

SEQ ID NO: 38010 - protein, 6 aa, synthetic construct
PYEKPD

SEQ ID NO: 38011 - protein, 6 aa, synthetic construct
PYEKPE

SEQ ID NO: 38012 - protein, 6 aa, synthetic construct
PYEKPF

SEQ ID NO: 38013 - protein, 6 aa, synthetic construct
PYEKPW

SEQ ID NO: 38014 - protein, 6 aa, synthetic construct
PYEKPY

SEQ ID NO: 38015 - protein, 6 aa, synthetic construct
PYEKSD

SEQ ID NO: 38016 - protein, 6 aa, synthetic construct
PYEKSE

SEQ ID NO: 38017 - protein, 6 aa, synthetic construct
PYEKSF

SEQ ID NO: 38018 - protein, 6 aa, synthetic construct
PYEKSW

SEQ ID NO: 38019 - protein, 6 aa, synthetic construct
PYEKSY

SEQ ID NO: 38020 - protein, 6 aa, synthetic construct
PYEKTD

SEQ ID NO: 38021 - protein, 6 aa, synthetic construct
PYEKTE

SEQ ID NO: 38022 - protein, 6 aa, synthetic construct
PYEKTF

SEQ ID NO: 38023 - protein, 6 aa, synthetic construct
PYEKTW

SEQ ID NO: 38024 - protein, 6 aa, synthetic construct
PYEKTY

SEQ ID NO: 38025 - protein, 6 aa, synthetic construct
PYEKWD

SEQ ID NO: 38026 - protein, 6 aa, synthetic construct
PYEKWE

SEQ ID NO: 38027 - protein, 6 aa, synthetic construct
PYEKWF

SEQ ID NO: 38028 - protein, 6 aa, synthetic construct
PYEKWW

SEQ ID NO: 38029 - protein, 6 aa, synthetic construct
PYEKWY

SEQ ID NO: 38030 - protein, 6 aa, synthetic construct
PYEKYD

SEQ ID NO: 38031 - protein, 6 aa, synthetic construct
PYEKYE

SEQ ID NO: 38032 - protein, 6 aa, synthetic construct
PYEKYF

SEQ ID NO: 38033 - protein, 6 aa, synthetic construct
PYEKYW

SEQ ID NO: 38034 - protein, 6 aa, synthetic construct
PYEKYY

SEQ ID NO: 38035 - protein, 6 aa, synthetic construct
PYEKVD

SEQ ID NO: 38036 - protein, 6 aa, synthetic construct
PYEKVE

SEQ ID NO: 38037 - protein, 6 aa, synthetic construct
PYEKVF

SEQ ID NO: 38038 - protein, 6 aa, synthetic construct
PYEKVW

SEQ ID NO: 38039 - protein, 6 aa, synthetic construct
PYEKVY

SEQ ID NO: 38040 - protein, 6 aa, synthetic construct
PYEMAD

SEQ ID NO: 38041 - protein, 6 aa, synthetic construct
PYEMAE

SEQ ID NO: 38042 - protein, 6 aa, synthetic construct
PYEMAF

SEQ ID NO: 38043 - protein, 6 aa, synthetic construct
PYEMAW

SEQ ID NO: 38044 - protein, 6 aa, synthetic construct
PYEMAY

SEQ ID NO: 38045 - protein, 6 aa, synthetic construct
PYEMRD

SEQ ID NO: 38046 - protein, 6 aa, synthetic construct
PYEMRE

SEQ ID NO: 38047 - protein, 6 aa, synthetic construct
PYEMRF

SEQ ID NO: 38048 - protein, 6 aa, synthetic construct
PYEMRW

SEQ ID NO: 38049 - protein, 6 aa, synthetic construct
PYEMRY

SEQ ID NO: 38050 - protein, 6 aa, synthetic construct
PYEMND

SEQ ID NO: 38051 - protein, 6 aa, synthetic construct
PYEMNE

SEQ ID NO: 38052 - protein, 6 aa, synthetic construct
PYEMNF

SEQ ID NO: 38053 - protein, 6 aa, synthetic construct
PYEMNW

SEQ ID NO: 38054 - protein, 6 aa, synthetic construct
PYEMNY

SEQ ID NO: 38055 - protein, 6 aa, synthetic construct
PYEMDD

SEQ ID NO: 38056 - protein, 6 aa, synthetic construct
PYEMDE

SEQ ID NO: 38057 - protein, 6 aa, synthetic construct
PYEMDF

SEQ ID NO: 38058 - protein, 6 aa, synthetic construct
PYEMDW

SEQ ID NO: 38059 - protein, 6 aa, synthetic construct
PYEMDY

SEQ ID NO: 38060 - protein, 6 aa, synthetic construct
PYEMCD

SEQ ID NO: 38061 - protein, 6 aa, synthetic construct
PYEMCE

SEQ ID NO: 38062 - protein, 6 aa, synthetic construct
PYEMCF

SEQ ID NO: 38063 - protein, 6 aa, synthetic construct
PYEMCW

SEQ ID NO: 38064 - protein, 6 aa, synthetic construct
PYEMCY

SEQ ID NO: 38065 - protein, 6 aa, synthetic construct
PYEMQD

SEQ ID NO: 38066 - protein, 6 aa, synthetic construct
PYEMQE

SEQ ID NO: 38067 - protein, 6 aa, synthetic construct
PYEMQF

SEQ ID NO: 38068 - protein, 6 aa, synthetic construct
PYEMQW

SEQ ID NO: 38069 - protein, 6 aa, synthetic construct
PYEMQY

SEQ ID NO: 38070 - protein, 6 aa, synthetic construct
PYEMED

SEQ ID NO: 38071 - protein, 6 aa, synthetic construct
PYEMEE

SEQ ID NO: 38072 - protein, 6 aa, synthetic construct
PYEMEF

SEQ ID NO: 38073 - protein, 6 aa, synthetic construct
PYEMEW

SEQ ID NO: 38074 - protein, 6 aa, synthetic construct
PYEMEY

SEQ ID NO: 38075 - protein, 6 aa, synthetic construct
PYEMGD

SEQ ID NO: 38076 - protein, 6 aa, synthetic construct
PYEMGE

SEQ ID NO: 38077 - protein, 6 aa, synthetic construct
PYEMGF

SEQ ID NO: 38078 - protein, 6 aa, synthetic construct
PYEMGW

SEQ ID NO: 38079 - protein, 6 aa, synthetic construct
PYEMGY

SEQ ID NO: 38080 - protein, 6 aa, synthetic construct
PYEMHD

SEQ ID NO: 38081 - protein, 6 aa, synthetic construct
PYEMHE

SEQ ID NO: 38082 - protein, 6 aa, synthetic construct
PYEMHF

SEQ ID NO: 38083 - protein, 6 aa, synthetic construct
PYEMHW

SEQ ID NO: 38084 - protein, 6 aa, synthetic construct
PYEMHY

SEQ ID NO: 38085 - protein, 6 aa, synthetic construct
PYEMID

SEQ ID NO: 38086 - protein, 6 aa, synthetic construct
PYEMIE

SEQ ID NO: 38087 - protein, 6 aa, synthetic construct
PYEMIF

SEQ ID NO: 38088 - protein, 6 aa, synthetic construct
PYEMIW

SEQ ID NO: 38089 - protein, 6 aa, synthetic construct
PYEMIY

SEQ ID NO: 38090 - protein, 6 aa, synthetic construct
PYEMLD

SEQ ID NO: 38091 - protein, 6 aa, synthetic construct
PYEMLE

SEQ ID NO: 38092 - protein, 6 aa, synthetic construct
PYEMLF

SEQ ID NO: 38093 - protein, 6 aa, synthetic construct
PYEMLW

SEQ ID NO: 38094 - protein, 6 aa, synthetic construct
PYEMLY

SEQ ID NO: 38095 - protein, 6 aa, synthetic construct
PYEMKD

SEQ ID NO: 38096 - protein, 6 aa, synthetic construct
PYEMKE

SEQ ID NO: 38097 - protein, 6 aa, synthetic construct
PYEMKF

SEQ ID NO: 38098 - protein, 6 aa, synthetic construct
PYEMKW

SEQ ID NO: 38099 - protein, 6 aa, synthetic construct
PYEMKY

SEQ ID NO: 38100 - protein, 6 aa, synthetic construct
PYEMMD

SEQ ID NO: 38101 - protein, 6 aa, synthetic construct
PYEMME

SEQ ID NO: 38102 - protein, 6 aa, synthetic construct
PYEMMF

SEQ ID NO: 38103 - protein, 6 aa, synthetic construct
PYEMMW

SEQ ID NO: 38104 - protein, 6 aa, synthetic construct
PYEMMY

SEQ ID NO: 38105 - protein, 6 aa, synthetic construct
PYEMFD

SEQ ID NO: 38106 - protein, 6 aa, synthetic construct
PYEMFE

SEQ ID NO: 38107 - protein, 6 aa, synthetic construct
PYEMFF

SEQ ID NO: 38108 - protein, 6 aa, synthetic construct
PYEMFW

SEQ ID NO: 38109 - protein, 6 aa, synthetic construct
PYEMFY

SEQ ID NO: 38110 - protein, 6 aa, synthetic construct
PYEMPD

SEQ ID NO: 38111 - protein, 6 aa, synthetic construct
PYEMPE

SEQ ID NO: 38112 - protein, 6 aa, synthetic construct
PYEMPF

SEQ ID NO: 38113 - protein, 6 aa, synthetic construct
PYEMPW

SEQ ID NO: 38114 - protein, 6 aa, synthetic construct
PYEMPY

SEQ ID NO: 38115 - protein, 6 aa, synthetic construct
PYEMSD

SEQ ID NO: 38116 - protein, 6 aa, synthetic construct
PYEMSE

SEQ ID NO: 38117 - protein, 6 aa, synthetic construct
PYEMSF

SEQ ID NO: 38118 - protein, 6 aa, synthetic construct
PYEMSW

SEQ ID NO: 38119 - protein, 6 aa, synthetic construct
PYEMSY

SEQ ID NO: 38120 - protein, 6 aa, synthetic construct
PYEMTD

SEQ ID NO: 38121 - protein, 6 aa, synthetic construct
PYEMTE

SEQ ID NO: 38122 - protein, 6 aa, synthetic construct
PYEMTF

SEQ ID NO: 38123 - protein, 6 aa, synthetic construct
PYEMTW

SEQ ID NO: 38124 - protein, 6 aa, synthetic construct
PYEMTY

SEQ ID NO: 38125 - protein, 6 aa, synthetic construct
PYEMWD

SEQ ID NO: 38126 - protein, 6 aa, synthetic construct
PYEMWE

SEQ ID NO: 38127 - protein, 6 aa, synthetic construct
PYEMWF

SEQ ID NO: 38128 - protein, 6 aa, synthetic construct
PYEMWW

SEQ ID NO: 38129 - protein, 6 aa, synthetic construct
PYEMWY

SEQ ID NO: 38130 - protein, 6 aa, synthetic construct
PYEMYD

SEQ ID NO: 38131 - protein, 6 aa, synthetic construct
PYEMYE

SEQ ID NO: 38132 - protein, 6 aa, synthetic construct
PYEMYF

SEQ ID NO: 38133 - protein, 6 aa, synthetic construct
PYEMYW

SEQ ID NO: 38134 - protein, 6 aa, synthetic construct
PYEMYY

SEQ ID NO: 38135 - protein, 6 aa, synthetic construct
PYEMVD

SEQ ID NO: 38136 - protein, 6 aa, synthetic construct
PYEMVE

SEQ ID NO: 38137 - protein, 6 aa, synthetic construct
PYEMVF

SEQ ID NO: 38138 - protein, 6 aa, synthetic construct
PYEMVW

SEQ ID NO: 38139 - protein, 6 aa, synthetic construct
PYEMVY

SEQ ID NO: 38140 - protein, 6 aa, synthetic construct
PYEFAD

SEQ ID NO: 38141 - protein, 6 aa, synthetic construct
PYEFAE

SEQ ID NO: 38142 - protein, 6 aa, synthetic construct
PYEFAF

SEQ ID NO: 38143 - protein, 6 aa, synthetic construct
PYEFAW

SEQ ID NO: 38144 - protein, 6 aa, synthetic construct
PYEFAY

SEQ ID NO: 38145 - protein, 6 aa, synthetic construct
PYEFRD

SEQ ID NO: 38146 - protein, 6 aa, synthetic construct
PYEFRE

SEQ ID NO: 38147 - protein, 6 aa, synthetic construct
PYEFRF

SEQ ID NO: 38148 - protein, 6 aa, synthetic construct
PYEFRW

SEQ ID NO: 38149 - protein, 6 aa, synthetic construct
PYEFRY

SEQ ID NO: 38150 - protein, 6 aa, synthetic construct
PYEFND

SEQ ID NO: 38151 - protein, 6 aa, synthetic construct
PYEFNE

SEQ ID NO: 38152 - protein, 6 aa, synthetic construct
PYEFNF

SEQ ID NO: 38153 - protein, 6 aa, synthetic construct
PYEFNW

SEQ ID NO: 38154 - protein, 6 aa, synthetic construct
PYEFNY

SEQ ID NO: 38155 - protein, 6 aa, synthetic construct
PYEFDD

SEQ ID NO: 38156 - protein, 6 aa, synthetic construct
PYEFDE

SEQ ID NO: 38157 - protein, 6 aa, synthetic construct
PYEFDF

SEQ ID NO: 38158 - protein, 6 aa, synthetic construct
PYEFDW

SEQ ID NO: 38159 - protein, 6 aa, synthetic construct
PYEFDY

SEQ ID NO: 38160 - protein, 6 aa, synthetic construct
PYEFCD

SEQ ID NO: 38161 - protein, 6 aa, synthetic construct
PYEFCE

SEQ ID NO: 38162 - protein, 6 aa, synthetic construct
PYEFCF

SEQ ID NO: 38163 - protein, 6 aa, synthetic construct
PYEFCW

SEQ ID NO: 38164 - protein, 6 aa, synthetic construct
PYEFCY

SEQ ID NO: 38165 - protein, 6 aa, synthetic construct
PYEFQD

SEQ ID NO: 38166 - protein, 6 aa, synthetic construct
PYEFQE

SEQ ID NO: 38167 - protein, 6 aa, synthetic construct
PYEFQF

SEQ ID NO: 38168 - protein, 6 aa, synthetic construct
PYEFQW

SEQ ID NO: 38169 - protein, 6 aa, synthetic construct
PYEFQY

SEQ ID NO: 38170 - protein, 6 aa, synthetic construct
PYEFED

SEQ ID NO: 38171 - protein, 6 aa, synthetic construct
PYEFEE

SEQ ID NO: 38172 - protein, 6 aa, synthetic construct
PYEFEF

SEQ ID NO: 38173 - protein, 6 aa, synthetic construct
PYEFEW

SEQ ID NO: 38174 - protein, 6 aa, synthetic construct
PYEFEY

SEQ ID NO: 38175 - protein, 6 aa, synthetic construct
PYEFGD

SEQ ID NO: 38176 - protein, 6 aa, synthetic construct
PYEFGE

SEQ ID NO: 38177 - protein, 6 aa, synthetic construct
PYEFGF

SEQ ID NO: 38178 - protein, 6 aa, synthetic construct
PYEFGW

SEQ ID NO: 38179 - protein, 6 aa, synthetic construct
PYEFGY

SEQ ID NO: 38180 - protein, 6 aa, synthetic construct
PYEFHD

SEQ ID NO: 38181 - protein, 6 aa, synthetic construct
PYEFHE

SEQ ID NO: 38182 - protein, 6 aa, synthetic construct
PYEFHF

SEQ ID NO: 38183 - protein, 6 aa, synthetic construct
PYEFHW

SEQ ID NO: 38184 - protein, 6 aa, synthetic construct
PYEFHY

SEQ ID NO: 38185 - protein, 6 aa, synthetic construct
PYEFID

SEQ ID NO: 38186 - protein, 6 aa, synthetic construct
PYEFIE

SEQ ID NO: 38187 - protein, 6 aa, synthetic construct
PYEFIF

SEQ ID NO: 38188 - protein, 6 aa, synthetic construct
PYEFIW

SEQ ID NO: 38189 - protein, 6 aa, synthetic construct
PYEFIY

SEQ ID NO: 38190 - protein, 6 aa, synthetic construct
PYEFLD

SEQ ID NO: 38191 - protein, 6 aa, synthetic construct
PYEFLE

SEQ ID NO: 38192 - protein, 6 aa, synthetic construct
PYEFLF

SEQ ID NO: 38193 - protein, 6 aa, synthetic construct
PYEFLW

SEQ ID NO: 38194 - protein, 6 aa, synthetic construct
PYEFLY

SEQ ID NO: 38195 - protein, 6 aa, synthetic construct
PYEFKD

SEQ ID NO: 38196 - protein, 6 aa, synthetic construct
PYEFKE

SEQ ID NO: 38197 - protein, 6 aa, synthetic construct
PYEFKF

SEQ ID NO: 38198 - protein, 6 aa, synthetic construct
PYEFKW

SEQ ID NO: 38199 - protein, 6 aa, synthetic construct
PYEFKY

SEQ ID NO: 38200 - protein, 6 aa, synthetic construct
PYEFMD

SEQ ID NO: 38201 - protein, 6 aa, synthetic construct
PYEFME

SEQ ID NO: 38202 - protein, 6 aa, synthetic construct
PYEFMF

SEQ ID NO: 38203 - protein, 6 aa, synthetic construct
PYEFMW

SEQ ID NO: 38204 - protein, 6 aa, synthetic construct
PYEFMY

SEQ ID NO: 38205 - protein, 6 aa, synthetic construct
PYEFFD

SEQ ID NO: 38206 - protein, 6 aa, synthetic construct
PYEFFE

SEQ ID NO: 38207 - protein, 6 aa, synthetic construct
PYEFFF

SEQ ID NO: 38208 - protein, 6 aa, synthetic construct
PYEFFW

SEQ ID NO: 38209 - protein, 6 aa, synthetic construct
PYEFFY

SEQ ID NO: 38210 - protein, 6 aa, synthetic construct
PYEFPD

SEQ ID NO: 38211 - protein, 6 aa, synthetic construct
PYEFPE

SEQ ID NO: 38212 - protein, 6 aa, synthetic construct
PYEFPF

SEQ ID NO: 38213 - protein, 6 aa, synthetic construct
PYEFPW

SEQ ID NO: 38214 - protein, 6 aa, synthetic construct
PYEFPY

SEQ ID NO: 38215 - protein, 6 aa, synthetic construct
PYEFSD

SEQ ID NO: 38216 - protein, 6 aa, synthetic construct
PYEFSE

SEQ ID NO: 38217 - protein, 6 aa, synthetic construct
PYEFSF

SEQ ID NO: 38218 - protein, 6 aa, synthetic construct
PYEFSW

SEQ ID NO: 38219 - protein, 6 aa, synthetic construct
PYEFSY

SEQ ID NO: 38220 - protein, 6 aa, synthetic construct
PYEFTD

SEQ ID NO: 38221 - protein, 6 aa, synthetic construct
PYEFTE

SEQ ID NO: 38222 - protein, 6 aa, synthetic construct
PYEFTF

SEQ ID NO: 38223 - protein, 6 aa, synthetic construct
PYEFTW

SEQ ID NO: 38224 - protein, 6 aa, synthetic construct
PYEFTY

SEQ ID NO: 38225 - protein, 6 aa, synthetic construct
PYEFWD

SEQ ID NO: 38226 - protein, 6 aa, synthetic construct
PYEFWE

SEQ ID NO: 38227 - protein, 6 aa, synthetic construct
PYEFWF

SEQ ID NO: 38228 - protein, 6 aa, synthetic construct
PYEFWW

SEQ ID NO: 38229 - protein, 6 aa, synthetic construct
PYEFWY

SEQ ID NO: 38230 - protein, 6 aa, synthetic construct
PYEFYD

SEQ ID NO: 38231 - protein, 6 aa, synthetic construct
PYEFYE

SEQ ID NO: 38232 - protein, 6 aa, synthetic construct
PYEFYF

SEQ ID NO: 38233 - protein, 6 aa, synthetic construct
PYEFYW

SEQ ID NO: 38234 - protein, 6 aa, synthetic construct
PYEFYY

SEQ ID NO: 38235 - protein, 6 aa, synthetic construct
PYEFVD

SEQ ID NO: 38236 - protein, 6 aa, synthetic construct
PYEFVE

SEQ ID NO: 38237 - protein, 6 aa, synthetic construct
PYEFVF

SEQ ID NO: 38238 - protein, 6 aa, synthetic construct
PYEFVW

SEQ ID NO: 38239 - protein, 6 aa, synthetic construct
PYEFVY

SEQ ID NO: 38240 - protein, 6 aa, synthetic construct
PYEPAD

SEQ ID NO: 38241 - protein, 6 aa, synthetic construct
PYEPAE

SEQ ID NO: 38242 - protein, 6 aa, synthetic construct
PYEPAF

SEQ ID NO: 38243 - protein, 6 aa, synthetic construct
PYEPAW

SEQ ID NO: 38244 - protein, 6 aa, synthetic construct
PYEPAY

SEQ ID NO: 38245 - protein, 6 aa, synthetic construct
PYEPRD

SEQ ID NO: 38246 - protein, 6 aa, synthetic construct
PYEPRE

SEQ ID NO: 38247 - protein, 6 aa, synthetic construct
PYEPRF

SEQ ID NO: 38248 - protein, 6 aa, synthetic construct
PYEPRW

SEQ ID NO: 38249 - protein, 6 aa, synthetic construct
PYEPRY

SEQ ID NO: 38250 - protein, 6 aa, synthetic construct
PYEPND

SEQ ID NO: 38251 - protein, 6 aa, synthetic construct
PYEPNE

SEQ ID NO: 38252 - protein, 6 aa, synthetic construct
PYEPNF

SEQ ID NO: 38253 - protein, 6 aa, synthetic construct
PYEPNW

SEQ ID NO: 38254 - protein, 6 aa, synthetic construct
PYEPNY

SEQ ID NO: 38255 - protein, 6 aa, synthetic construct
PYEPDD

SEQ ID NO: 38256 - protein, 6 aa, synthetic construct
PYEPDE

SEQ ID NO: 38257 - protein, 6 aa, synthetic construct
PYEPDF

SEQ ID NO: 38258 - protein, 6 aa, synthetic construct
PYEPDW

SEQ ID NO: 38259 - protein, 6 aa, synthetic construct
PYEPDY

SEQ ID NO: 38260 - protein, 6 aa, synthetic construct
PYEPCD

SEQ ID NO: 38261 - protein, 6 aa, synthetic construct
PYEPCE

SEQ ID NO: 38262 - protein, 6 aa, synthetic construct
PYEPCF

SEQ ID NO: 38263 - protein, 6 aa, synthetic construct
PYEPCW

SEQ ID NO: 38264 - protein, 6 aa, synthetic construct
PYEPCY

SEQ ID NO: 38265 - protein, 6 aa, synthetic construct
PYEPQD

SEQ ID NO: 38266 - protein, 6 aa, synthetic construct
PYEPQE

SEQ ID NO: 38267 - protein, 6 aa, synthetic construct
PYEPQF

SEQ ID NO: 38268 - protein, 6 aa, synthetic construct
PYEPQW

SEQ ID NO: 38269 - protein, 6 aa, synthetic construct
PYEPQY

SEQ ID NO: 38270 - protein, 6 aa, synthetic construct
PYEPED

SEQ ID NO: 38271 - protein, 6 aa, synthetic construct
PYEPEE

SEQ ID NO: 38272 - protein, 6 aa, synthetic construct
PYEPEF

SEQ ID NO: 38273 - protein, 6 aa, synthetic construct
PYEPEW

SEQ ID NO: 38274 - protein, 6 aa, synthetic construct
PYEPEY

SEQ ID NO: 38275 - protein, 6 aa, synthetic construct
PYEPGD

SEQ ID NO: 38276 - protein, 6 aa, synthetic construct
PYEPGE

SEQ ID NO: 38277 - protein, 6 aa, synthetic construct
PYEPGF

SEQ ID NO: 38278 - protein, 6 aa, synthetic construct
PYEPGW

SEQ ID NO: 38279 - protein, 6 aa, synthetic construct
PYEPGY

SEQ ID NO: 38280 - protein, 6 aa, synthetic construct
PYEPHD

SEQ ID NO: 38281 - protein, 6 aa, synthetic construct
PYEPHE

SEQ ID NO: 38282 - protein, 6 aa, synthetic construct
PYEPHF

SEQ ID NO: 38283 - protein, 6 aa, synthetic construct
PYEPHW

SEQ ID NO: 38284 - protein, 6 aa, synthetic construct
PYEPHY

SEQ ID NO: 38285 - protein, 6 aa, synthetic construct
PYEPID

SEQ ID NO: 38286 - protein, 6 aa, synthetic construct
PYEPIE

SEQ ID NO: 38287 - protein, 6 aa, synthetic construct
PYEPIF

SEQ ID NO: 38288 - protein, 6 aa, synthetic construct
PYEPIW

SEQ ID NO: 38289 - protein, 6 aa, synthetic construct
PYEPIY

SEQ ID NO: 38290 - protein, 6 aa, synthetic construct
PYEPLD

SEQ ID NO: 38291 - protein, 6 aa, synthetic construct
PYEPLE

SEQ ID NO: 38292 - protein, 6 aa, synthetic construct
PYEPLF

SEQ ID NO: 38293 - protein, 6 aa, synthetic construct
PYEPLW

SEQ ID NO: 38294 - protein, 6 aa, synthetic construct
PYEPLY

SEQ ID NO: 38295 - protein, 6 aa, synthetic construct
PYEPKD

SEQ ID NO: 38296 - protein, 6 aa, synthetic construct
PYEPKE

SEQ ID NO: 38297 - protein, 6 aa, synthetic construct
PYEPKF

SEQ ID NO: 38298 - protein, 6 aa, synthetic construct
PYEPKW

SEQ ID NO: 38299 - protein, 6 aa, synthetic construct
PYEPKY

SEQ ID NO: 38300 - protein, 6 aa, synthetic construct
PYEPMD

SEQ ID NO: 38301 - protein, 6 aa, synthetic construct
PYEPME

SEQ ID NO: 38302 - protein, 6 aa, synthetic construct
PYEPMF

SEQ ID NO: 38303 - protein, 6 aa, synthetic construct
PYEPMW

SEQ ID NO: 38304 - protein, 6 aa, synthetic construct
PYEPMY

SEQ ID NO: 38305 - protein, 6 aa, synthetic construct
PYEPFD

SEQ ID NO: 38306 - protein, 6 aa, synthetic construct
PYEPFE

SEQ ID NO: 38307 - protein, 6 aa, synthetic construct
PYEPFF

SEQ ID NO: 38308 - protein, 6 aa, synthetic construct
PYEPFW

SEQ ID NO: 38309 - protein, 6 aa, synthetic construct
PYEPFY

SEQ ID NO: 38310 - protein, 6 aa, synthetic construct
PYEPPD

SEQ ID NO: 38311 - protein, 6 aa, synthetic construct
PYEPPE

SEQ ID NO: 38312 - protein, 6 aa, synthetic construct
PYEPPF

SEQ ID NO: 38313 - protein, 6 aa, synthetic construct
PYEPPW

SEQ ID NO: 38314 - protein, 6 aa, synthetic construct
PYEPPY

SEQ ID NO: 38315 - protein, 6 aa, synthetic construct
PYEPSD

SEQ ID NO: 38316 - protein, 6 aa, synthetic construct
PYEPSE

SEQ ID NO: 38317 - protein, 6 aa, synthetic construct
PYEPSF

SEQ ID NO: 38318 - protein, 6 aa, synthetic construct
PYEPSW

SEQ ID NO: 38319 - protein, 6 aa, synthetic construct
PYEPSY

SEQ ID NO: 38320 - protein, 6 aa, synthetic construct
PYEPTD

SEQ ID NO: 38321 - protein, 6 aa, synthetic construct
PYEPTE

SEQ ID NO: 38322 - protein, 6 aa, synthetic construct
PYEPTF

SEQ ID NO: 38323 - protein, 6 aa, synthetic construct
PYEPTW

SEQ ID NO: 38324 - protein, 6 aa, synthetic construct
PYEPTY

SEQ ID NO: 38325 - protein, 6 aa, synthetic construct
PYEPWD

SEQ ID NO: 38326 - protein, 6 aa, synthetic construct
PYEPWE

SEQ ID NO: 38327 - protein, 6 aa, synthetic construct
PYEPWF

SEQ ID NO: 38328 - protein, 6 aa, synthetic construct
PYEPWW

SEQ ID NO: 38329 - protein, 6 aa, synthetic construct
PYEPWY

SEQ ID NO: 38330 - protein, 6 aa, synthetic construct
PYEPYD

SEQ ID NO: 38331 - protein, 6 aa, synthetic construct
PYEPYE

SEQ ID NO: 38332 - protein, 6 aa, synthetic construct
PYEPYF

SEQ ID NO: 38333 - protein, 6 aa, synthetic construct
PYEPYW

SEQ ID NO: 38334 - protein, 6 aa, synthetic construct
PYEPYY

SEQ ID NO: 38335 - protein, 6 aa, synthetic construct
PYEPVD

SEQ ID NO: 38336 - protein, 6 aa, synthetic construct
PYEPVE

SEQ ID NO: 38337 - protein, 6 aa, synthetic construct
PYEPVF

SEQ ID NO: 38338 - protein, 6 aa, synthetic construct
PYEPVW

SEQ ID NO: 38339 - protein, 6 aa, synthetic construct
PYEPVY

SEQ ID NO: 38340 - protein, 6 aa, synthetic construct
PYESAD

SEQ ID NO: 38341 - protein, 6 aa, synthetic construct
PYESAE

SEQ ID NO: 38342 - protein, 6 aa, synthetic construct
PYESAF

SEQ ID NO: 38343 - protein, 6 aa, synthetic construct
PYESAW

SEQ ID NO: 38344 - protein, 6 aa, synthetic construct
PYESAY

SEQ ID NO: 38345 - protein, 6 aa, synthetic construct
PYESRD

SEQ ID NO: 38346 - protein, 6 aa, synthetic construct
PYESRE

SEQ ID NO: 38347 - protein, 6 aa, synthetic construct
PYESRF

SEQ ID NO: 38348 - protein, 6 aa, synthetic construct
PYESRW

SEQ ID NO: 38349 - protein, 6 aa, synthetic construct
PYESRY

SEQ ID NO: 38350 - protein, 6 aa, synthetic construct
PYESND

SEQ ID NO: 38351 - protein, 6 aa, synthetic construct
PYESNE

SEQ ID NO: 38352 - protein, 6 aa, synthetic construct
PYESNF

SEQ ID NO: 38353 - protein, 6 aa, synthetic construct
PYESNW

SEQ ID NO: 38354 - protein, 6 aa, synthetic construct
PYESNY

SEQ ID NO: 38355 - protein, 6 aa, synthetic construct
PYESDD

SEQ ID NO: 38356 - protein, 6 aa, synthetic construct
PYESDE

SEQ ID NO: 38357 - protein, 6 aa, synthetic construct
PYESDF

SEQ ID NO: 38358 - protein, 6 aa, synthetic construct
PYESDW

SEQ ID NO: 38359 - protein, 6 aa, synthetic construct
PYESDY

SEQ ID NO: 38360 - protein, 6 aa, synthetic construct
PYESCD

SEQ ID NO: 38361 - protein, 6 aa, synthetic construct
PYESCE

SEQ ID NO: 38362 - protein, 6 aa, synthetic construct
PYESCF

SEQ ID NO: 38363 - protein, 6 aa, synthetic construct
PYESCW

SEQ ID NO: 38364 - protein, 6 aa, synthetic construct
PYESCY

SEQ ID NO: 38365 - protein, 6 aa, synthetic construct
PYESQD

SEQ ID NO: 38366 - protein, 6 aa, synthetic construct
PYESQE

SEQ ID NO: 38367 - protein, 6 aa, synthetic construct
PYESQF

SEQ ID NO: 38368 - protein, 6 aa, synthetic construct
PYESQW

SEQ ID NO: 38369 - protein, 6 aa, synthetic construct
PYESQY

SEQ ID NO: 38370 - protein, 6 aa, synthetic construct
PYESED

SEQ ID NO: 38371 - protein, 6 aa, synthetic construct
PYESEE

SEQ ID NO: 38372 - protein, 6 aa, synthetic construct
PYESEF

SEQ ID NO: 38373 - protein, 6 aa, synthetic construct
PYESEW

SEQ ID NO: 38374 - protein, 6 aa, synthetic construct
PYESEY

SEQ ID NO: 38375 - protein, 6 aa, synthetic construct
PYESGD

SEQ ID NO: 38376 - protein, 6 aa, synthetic construct
PYESGE

SEQ ID NO: 38377 - protein, 6 aa, synthetic construct
PYESGF

SEQ ID NO: 38378 - protein, 6 aa, synthetic construct
PYESGW

SEQ ID NO: 38379 - protein, 6 aa, synthetic construct
PYESGY

SEQ ID NO: 38380 - protein, 6 aa, synthetic construct
PYESHD

SEQ ID NO: 38381 - protein, 6 aa, synthetic construct
PYESHE

SEQ ID NO: 38382 - protein, 6 aa, synthetic construct
PYESHF

SEQ ID NO: 38383 - protein, 6 aa, synthetic construct
PYESHW

SEQ ID NO: 38384 - protein, 6 aa, synthetic construct
PYESHY

SEQ ID NO: 38385 - protein, 6 aa, synthetic construct
PYESID

SEQ ID NO: 38386 - protein, 6 aa, synthetic construct
PYESIE

SEQ ID NO: 38387 - protein, 6 aa, synthetic construct
PYESIF

SEQ ID NO: 38388 - protein, 6 aa, synthetic construct
PYESIW

SEQ ID NO: 38389 - protein, 6 aa, synthetic construct
PYESIY

SEQ ID NO: 38390 - protein, 6 aa, synthetic construct
PYESLD

SEQ ID NO: 38391 - protein, 6 aa, synthetic construct
PYESLE

SEQ ID NO: 38392 - protein, 6 aa, synthetic construct
PYESLF

SEQ ID NO: 38393 - protein, 6 aa, synthetic construct
PYESLW

SEQ ID NO: 38394 - protein, 6 aa, synthetic construct
PYESLY

SEQ ID NO: 38395 - protein, 6 aa, synthetic construct
PYESKD

SEQ ID NO: 38396 - protein, 6 aa, synthetic construct
PYESKE

SEQ ID NO: 38397 - protein, 6 aa, synthetic construct
PYESKF

SEQ ID NO: 38398 - protein, 6 aa, synthetic construct
PYESKW

SEQ ID NO: 38399 - protein, 6 aa, synthetic construct
PYESKY

SEQ ID NO: 38400 - protein, 6 aa, synthetic construct
PYESMD

SEQ ID NO: 38401 - protein, 6 aa, synthetic construct
PYESME

SEQ ID NO: 38402 - protein, 6 aa, synthetic construct
PYESMF

SEQ ID NO: 38403 - protein, 6 aa, synthetic construct
PYESMW

SEQ ID NO: 38404 - protein, 6 aa, synthetic construct
PYESMY

SEQ ID NO: 38405 - protein, 6 aa, synthetic construct
PYESFD

SEQ ID NO: 38406 - protein, 6 aa, synthetic construct
PYESFE

SEQ ID NO: 38407 - protein, 6 aa, synthetic construct
PYESFF

SEQ ID NO: 38408 - protein, 6 aa, synthetic construct
PYESFW

SEQ ID NO: 38409 - protein, 6 aa, synthetic construct
PYESFY

SEQ ID NO: 38410 - protein, 6 aa, synthetic construct
PYESPD

SEQ ID NO: 38411 - protein, 6 aa, synthetic construct
PYESPE

SEQ ID NO: 38412 - protein, 6 aa, synthetic construct
PYESPF

SEQ ID NO: 38413 - protein, 6 aa, synthetic construct
PYESPW

SEQ ID NO: 38414 - protein, 6 aa, synthetic construct
PYESPY

SEQ ID NO: 38415 - protein, 6 aa, synthetic construct
PYESSD

SEQ ID NO: 38416 - protein, 6 aa, synthetic construct
PYESSE

SEQ ID NO: 38417 - protein, 6 aa, synthetic construct
PYESSF

SEQ ID NO: 38418 - protein, 6 aa, synthetic construct
PYESSW

SEQ ID NO: 38419 - protein, 6 aa, synthetic construct
PYESSY

SEQ ID NO: 38420 - protein, 6 aa, synthetic construct
PYESTD

SEQ ID NO: 38421 - protein, 6 aa, synthetic construct
PYESTE

SEQ ID NO: 38422 - protein, 6 aa, synthetic construct
PYESTF

SEQ ID NO: 38423 - protein, 6 aa, synthetic construct
PYESTW

SEQ ID NO: 38424 - protein, 6 aa, synthetic construct
PYESTY

SEQ ID NO: 38425 - protein, 6 aa, synthetic construct
PYESWD

SEQ ID NO: 38426 - protein, 6 aa, synthetic construct
PYESWE

SEQ ID NO: 38427 - protein, 6 aa, synthetic construct
PYESWF

SEQ ID NO: 38428 - protein, 6 aa, synthetic construct
PYESWW

SEQ ID NO: 38429 - protein, 6 aa, synthetic construct
PYESWY

SEQ ID NO: 38430 - protein, 6 aa, synthetic construct
PYESYD

SEQ ID NO: 38431 - protein, 6 aa, synthetic construct
PYESYE

SEQ ID NO: 38432 - protein, 6 aa, synthetic construct
PYESYF

SEQ ID NO: 38433 - protein, 6 aa, synthetic construct
PYESYW

SEQ ID NO: 38434 - protein, 6 aa, synthetic construct
PYESYY

SEQ ID NO: 38435 - protein, 6 aa, synthetic construct
PYESVD

SEQ ID NO: 38436 - protein, 6 aa, synthetic construct
PYESVE

SEQ ID NO: 38437 - protein, 6 aa, synthetic construct
PYESVF

SEQ ID NO: 38438 - protein, 6 aa, synthetic construct
PYESVW

SEQ ID NO: 38439 - protein, 6 aa, synthetic construct
PYESVY

SEQ ID NO: 38440 - protein, 6 aa, synthetic construct
PYETAD

SEQ ID NO: 38441 - protein, 6 aa, synthetic construct
PYETAE

SEQ ID NO: 38442 - protein, 6 aa, synthetic construct
PYETAF

SEQ ID NO: 38443 - protein, 6 aa, synthetic construct
PYETAW

SEQ ID NO: 38444 - protein, 6 aa, synthetic construct
PYETAY

SEQ ID NO: 38445 - protein, 6 aa, synthetic construct
PYETRD

SEQ ID NO: 38446 - protein, 6 aa, synthetic construct
PYETRE

SEQ ID NO: 38447 - protein, 6 aa, synthetic construct
PYETRF

SEQ ID NO: 38448 - protein, 6 aa, synthetic construct
PYETRW

SEQ ID NO: 38449 - protein, 6 aa, synthetic construct
PYETRY

SEQ ID NO: 38450 - protein, 6 aa, synthetic construct
PYETND

SEQ ID NO: 38451 - protein, 6 aa, synthetic construct
PYETNE

SEQ ID NO: 38452 - protein, 6 aa, synthetic construct
PYETNF

SEQ ID NO: 38453 - protein, 6 aa, synthetic construct
PYETNW

SEQ ID NO: 38454 - protein, 6 aa, synthetic construct
PYETNY

SEQ ID NO: 38455 - protein, 6 aa, synthetic construct
PYETDD

SEQ ID NO: 38456 - protein, 6 aa, synthetic construct
PYETDE

SEQ ID NO: 38457 - protein, 6 aa, synthetic construct
PYETDF

SEQ ID NO: 38458 - protein, 6 aa, synthetic construct
PYETDW

SEQ ID NO: 38459 - protein, 6 aa, synthetic construct
PYETDY

SEQ ID NO: 38460 - protein, 6 aa, synthetic construct
PYETCD

SEQ ID NO: 38461 - protein, 6 aa, synthetic construct
PYETCE

SEQ ID NO: 38462 - protein, 6 aa, synthetic construct
PYETCF

SEQ ID NO: 38463 - protein, 6 aa, synthetic construct
PYETCW

SEQ ID NO: 38464 - protein, 6 aa, synthetic construct
PYETCY

SEQ ID NO: 38465 - protein, 6 aa, synthetic construct
PYETQD

SEQ ID NO: 38466 - protein, 6 aa, synthetic construct
PYETQE

SEQ ID NO: 38467 - protein, 6 aa, synthetic construct
PYETQF

SEQ ID NO: 38468 - protein, 6 aa, synthetic construct
PYETQW

SEQ ID NO: 38469 - protein, 6 aa, synthetic construct
PYETQY

SEQ ID NO: 38470 - protein, 6 aa, synthetic construct
PYETED

SEQ ID NO: 38471 - protein, 6 aa, synthetic construct
PYETEE

SEQ ID NO: 38472 - protein, 6 aa, synthetic construct
PYETEF

SEQ ID NO: 38473 - protein, 6 aa, synthetic construct
PYETEW

SEQ ID NO: 38474 - protein, 6 aa, synthetic construct
PYETEY

SEQ ID NO: 38475 - protein, 6 aa, synthetic construct
PYETGD

SEQ ID NO: 38476 - protein, 6 aa, synthetic construct
PYETGE

SEQ ID NO: 38477 - protein, 6 aa, synthetic construct
PYETGF

SEQ ID NO: 38478 - protein, 6 aa, synthetic construct
PYETGW

SEQ ID NO: 38479 - protein, 6 aa, synthetic construct
PYETGY

SEQ ID NO: 38480 - protein, 6 aa, synthetic construct
PYETHD

SEQ ID NO: 38481 - protein, 6 aa, synthetic construct
PYETHE

SEQ ID NO: 38482 - protein, 6 aa, synthetic construct
PYETHF

SEQ ID NO: 38483 - protein, 6 aa, synthetic construct
PYETHW

SEQ ID NO: 38484 - protein, 6 aa, synthetic construct
PYETHY

SEQ ID NO: 38485 - protein, 6 aa, synthetic construct
PYETID

SEQ ID NO: 38486 - protein, 6 aa, synthetic construct
PYETIE

SEQ ID NO: 38487 - protein, 6 aa, synthetic construct
PYETIF

SEQ ID NO: 38488 - protein, 6 aa, synthetic construct
PYETIW

SEQ ID NO: 38489 - protein, 6 aa, synthetic construct
PYETIY

SEQ ID NO: 38490 - protein, 6 aa, synthetic construct
PYETLD

SEQ ID NO: 38491 - protein, 6 aa, synthetic construct
PYETLE

SEQ ID NO: 38492 - protein, 6 aa, synthetic construct
PYETLF

SEQ ID NO: 38493 - protein, 6 aa, synthetic construct
PYETLW

SEQ ID NO: 38494 - protein, 6 aa, synthetic construct
PYETLY

SEQ ID NO: 38495 - protein, 6 aa, synthetic construct
PYETKD

SEQ ID NO: 38496 - protein, 6 aa, synthetic construct
PYETKE

SEQ ID NO: 38497 - protein, 6 aa, synthetic construct
PYETKF

SEQ ID NO: 38498 - protein, 6 aa, synthetic construct
PYETKW

SEQ ID NO: 38499 - protein, 6 aa, synthetic construct
PYETKY

SEQ ID NO: 38500 - protein, 6 aa, synthetic construct
PYETMD

SEQ ID NO: 38501 - protein, 6 aa, synthetic construct
PYETME

SEQ ID NO: 38502 - protein, 6 aa, synthetic construct
PYETMF

SEQ ID NO: 38503 - protein, 6 aa, synthetic construct
PYETMW

SEQ ID NO: 38504 - protein, 6 aa, synthetic construct
PYETMY

SEQ ID NO: 38505 - protein, 6 aa, synthetic construct
PYETFD

SEQ ID NO: 38506 - protein, 6 aa, synthetic construct
PYETFE

SEQ ID NO: 38507 - protein, 6 aa, synthetic construct
PYETFF

SEQ ID NO: 38508 - protein, 6 aa, synthetic construct
PYETFW

SEQ ID NO: 38509 - protein, 6 aa, synthetic construct
PYETFY

SEQ ID NO: 38510 - protein, 6 aa, synthetic construct
PYETPD

SEQ ID NO: 38511 - protein, 6 aa, synthetic construct
PYETPE

SEQ ID NO: 38512 - protein, 6 aa, synthetic construct
PYETPF

SEQ ID NO: 38513 - protein, 6 aa, synthetic construct
PYETPW

SEQ ID NO: 38514 - protein, 6 aa, synthetic construct
PYETPY

SEQ ID NO: 38515 - protein, 6 aa, synthetic construct
PYETSD

SEQ ID NO: 38516 - protein, 6 aa, synthetic construct
PYETSE

SEQ ID NO: 38517 - protein, 6 aa, synthetic construct
PYETSF

SEQ ID NO: 38518 - protein, 6 aa, synthetic construct
PYETSW

SEQ ID NO: 38519 - protein, 6 aa, synthetic construct
PYETSY

SEQ ID NO: 38520 - protein, 6 aa, synthetic construct
PYETTD

SEQ ID NO: 38521 - protein, 6 aa, synthetic construct
PYETTE

SEQ ID NO: 38522 - protein, 6 aa, synthetic construct
PYETTF

SEQ ID NO: 38523 - protein, 6 aa, synthetic construct
PYETTW

SEQ ID NO: 38524 - protein, 6 aa, synthetic construct
PYETTY

SEQ ID NO: 38525 - protein, 6 aa, synthetic construct
PYETWD

SEQ ID NO: 38526 - protein, 6 aa, synthetic construct
PYETWE

SEQ ID NO: 38527 - protein, 6 aa, synthetic construct
PYETWF

SEQ ID NO: 38528 - protein, 6 aa, synthetic construct
PYETWW

SEQ ID NO: 38529 - protein, 6 aa, synthetic construct
PYETWY

SEQ ID NO: 38530 - protein, 6 aa, synthetic construct
PYETYD

SEQ ID NO: 38531 - protein, 6 aa, synthetic construct
PYETYE

SEQ ID NO: 38532 - protein, 6 aa, synthetic construct
PYETYF

SEQ ID NO: 38533 - protein, 6 aa, synthetic construct
PYETYW

SEQ ID NO: 38534 - protein, 6 aa, synthetic construct
PYETYY

SEQ ID NO: 38535 - protein, 6 aa, synthetic construct
PYETVD

SEQ ID NO: 38536 - protein, 6 aa, synthetic construct
PYETVE

SEQ ID NO: 38537 - protein, 6 aa, synthetic construct
PYETVF

SEQ ID NO: 38538 - protein, 6 aa, synthetic construct
PYETVW

SEQ ID NO: 38539 - protein, 6 aa, synthetic construct
PYETVY

SEQ ID NO: 38540 - protein, 6 aa, synthetic construct
PYEWAD

SEQ ID NO: 38541 - protein, 6 aa, synthetic construct
PYEWAE

SEQ ID NO: 38542 - protein, 6 aa, synthetic construct
PYEWAF

SEQ ID NO: 38543 - protein, 6 aa, synthetic construct
PYEWAW

SEQ ID NO: 38544 - protein, 6 aa, synthetic construct
PYEWAY

SEQ ID NO: 38545 - protein, 6 aa, synthetic construct
PYEWRD

SEQ ID NO: 38546 - protein, 6 aa, synthetic construct
PYEWRE

SEQ ID NO: 38547 - protein, 6 aa, synthetic construct
PYEWRF

SEQ ID NO: 38548 - protein, 6 aa, synthetic construct
PYEWRW

SEQ ID NO: 38549 - protein, 6 aa, synthetic construct
PYEWRY

SEQ ID NO: 38550 - protein, 6 aa, synthetic construct
PYEWND

SEQ ID NO: 38551 - protein, 6 aa, synthetic construct
PYEWNE

SEQ ID NO: 38552 - protein, 6 aa, synthetic construct
PYEWNF

SEQ ID NO: 38553 - protein, 6 aa, synthetic construct
PYEWNW

SEQ ID NO: 38554 - protein, 6 aa, synthetic construct
PYEWNY

SEQ ID NO: 38555 - protein, 6 aa, synthetic construct
PYEWDD

SEQ ID NO: 38556 - protein, 6 aa, synthetic construct
PYEWDE

SEQ ID NO: 38557 - protein, 6 aa, synthetic construct
PYEWDF

SEQ ID NO: 38558 - protein, 6 aa, synthetic construct
PYEWDW

SEQ ID NO: 38559 - protein, 6 aa, synthetic construct
PYEWDY

SEQ ID NO: 38560 - protein, 6 aa, synthetic construct
PYEWCD

SEQ ID NO: 38561 - protein, 6 aa, synthetic construct
PYEWCE

SEQ ID NO: 38562 - protein, 6 aa, synthetic construct
PYEWCF

SEQ ID NO: 38563 - protein, 6 aa, synthetic construct
PYEWCW

SEQ ID NO: 38564 - protein, 6 aa, synthetic construct
PYEWCY

SEQ ID NO: 38565 - protein, 6 aa, synthetic construct
PYEWQD

SEQ ID NO: 38566 - protein, 6 aa, synthetic construct
PYEWQE

SEQ ID NO: 38567 - protein, 6 aa, synthetic construct
PYEWQF

SEQ ID NO: 38568 - protein, 6 aa, synthetic construct
PYEWQW

SEQ ID NO: 38569 - protein, 6 aa, synthetic construct
PYEWQY

SEQ ID NO: 38570 - protein, 6 aa, synthetic construct
PYEWED

SEQ ID NO: 38571 - protein, 6 aa, synthetic construct
PYEWEE

SEQ ID NO: 38572 - protein, 6 aa, synthetic construct
PYEWEF

SEQ ID NO: 38573 - protein, 6 aa, synthetic construct
PYEWEW

SEQ ID NO: 38574 - protein, 6 aa, synthetic construct
PYEWEY

SEQ ID NO: 38575 - protein, 6 aa, synthetic construct
PYEWGD

SEQ ID NO: 38576 - protein, 6 aa, synthetic construct
PYEWGE

SEQ ID NO: 38577 - protein, 6 aa, synthetic construct
PYEWGF

SEQ ID NO: 38578 - protein, 6 aa, synthetic construct
PYEWGW

SEQ ID NO: 38579 - protein, 6 aa, synthetic construct
PYEWGY

SEQ ID NO: 38580 - protein, 6 aa, synthetic construct
PYEWHD

SEQ ID NO: 38581 - protein, 6 aa, synthetic construct
PYEWHE

SEQ ID NO: 38582 - protein, 6 aa, synthetic construct
PYEWHF

SEQ ID NO: 38583 - protein, 6 aa, synthetic construct
PYEWHW

SEQ ID NO: 38584 - protein, 6 aa, synthetic construct
PYEWHY

SEQ ID NO: 38585 - protein, 6 aa, synthetic construct
PYEWID

SEQ ID NO: 38586 - protein, 6 aa, synthetic construct
PYEWIE

SEQ ID NO: 38587 - protein, 6 aa, synthetic construct
PYEWIF

SEQ ID NO: 38588 - protein, 6 aa, synthetic construct
PYEWIW

SEQ ID NO: 38589 - protein, 6 aa, synthetic construct
PYEWIY

SEQ ID NO: 38590 - protein, 6 aa, synthetic construct
PYEWLD

SEQ ID NO: 38591 - protein, 6 aa, synthetic construct
PYEWLE

SEQ ID NO: 38592 - protein, 6 aa, synthetic construct
PYEWLF

SEQ ID NO: 38593 - protein, 6 aa, synthetic construct
PYEWLW

SEQ ID NO: 38594 - protein, 6 aa, synthetic construct
PYEWLY

SEQ ID NO: 38595 - protein, 6 aa, synthetic construct
PYEWKD

SEQ ID NO: 38596 - protein, 6 aa, synthetic construct
PYEWKE

SEQ ID NO: 38597 - protein, 6 aa, synthetic construct
PYEWKF

SEQ ID NO: 38598 - protein, 6 aa, synthetic construct
PYEWKW

SEQ ID NO: 38599 - protein, 6 aa, synthetic construct
PYEWKY

SEQ ID NO: 38600 - protein, 6 aa, synthetic construct
PYEWMD

SEQ ID NO: 38601 - protein, 6 aa, synthetic construct
PYEWME

SEQ ID NO: 38602 - protein, 6 aa, synthetic construct
PYEWMF

SEQ ID NO: 38603 - protein, 6 aa, synthetic construct
PYEWMW

SEQ ID NO: 38604 - protein, 6 aa, synthetic construct
PYEWMY

SEQ ID NO: 38605 - protein, 6 aa, synthetic construct
PYEWFD

SEQ ID NO: 38606 - protein, 6 aa, synthetic construct
PYEWFE

SEQ ID NO: 38607 - protein, 6 aa, synthetic construct
PYEWFF

SEQ ID NO: 38608 - protein, 6 aa, synthetic construct
PYEWFW

SEQ ID NO: 38609 - protein, 6 aa, synthetic construct
PYEWFY

SEQ ID NO: 38610 - protein, 6 aa, synthetic construct
PYEWPD

SEQ ID NO: 38611 - protein, 6 aa, synthetic construct
PYEWPE

SEQ ID NO: 38612 - protein, 6 aa, synthetic construct
PYEWPF

SEQ ID NO: 38613 - protein, 6 aa, synthetic construct
PYEWPW

SEQ ID NO: 38614 - protein, 6 aa, synthetic construct
PYEWPY

SEQ ID NO: 38615 - protein, 6 aa, synthetic construct
PYEWSD

SEQ ID NO: 38616 - protein, 6 aa, synthetic construct
PYEWSE

SEQ ID NO: 38617 - protein, 6 aa, synthetic construct
PYEWSF

SEQ ID NO: 38618 - protein, 6 aa, synthetic construct
PYEWSW

SEQ ID NO: 38619 - protein, 6 aa, synthetic construct
PYEWSY

SEQ ID NO: 38620 - protein, 6 aa, synthetic construct
PYEWTD

SEQ ID NO: 38621 - protein, 6 aa, synthetic construct
PYEWTE

SEQ ID NO: 38622 - protein, 6 aa, synthetic construct
PYEWTF

SEQ ID NO: 38623 - protein, 6 aa, synthetic construct
PYEWTW

SEQ ID NO: 38624 - protein, 6 aa, synthetic construct
PYEWTY

SEQ ID NO: 38625 - protein, 6 aa, synthetic construct
PYEWWD

SEQ ID NO: 38626 - protein, 6 aa, synthetic construct
PYEWWE

SEQ ID NO: 38627 - protein, 6 aa, synthetic construct
PYEWWF

SEQ ID NO: 38628 - protein, 6 aa, synthetic construct
PYEWWW

SEQ ID NO: 38629 - protein, 6 aa, synthetic construct
PYEWWY

SEQ ID NO: 38630 - protein, 6 aa, synthetic construct
PYEWYD

SEQ ID NO: 38631 - protein, 6 aa, synthetic construct
PYEWYE

SEQ ID NO: 38632 - protein, 6 aa, synthetic construct
PYEWYF

SEQ ID NO: 38633 - protein, 6 aa, synthetic construct
PYEWYW

SEQ ID NO: 38634 - protein, 6 aa, synthetic construct
PYEWYY

SEQ ID NO: 38635 - protein, 6 aa, synthetic construct
PYEWVD

SEQ ID NO: 38636 - protein, 6 aa, synthetic construct
PYEWVE

SEQ ID NO: 38637 - protein, 6 aa, synthetic construct
PYEWVF

SEQ ID NO: 38638 - protein, 6 aa, synthetic construct
PYEWVW

SEQ ID NO: 38639 - protein, 6 aa, synthetic construct
PYEWVY

SEQ ID NO: 38640 - protein, 6 aa, synthetic construct
PYEYAD

SEQ ID NO: 38641 - protein, 6 aa, synthetic construct
PYEYAE

SEQ ID NO: 38642 - protein, 6 aa, synthetic construct
PYEYAF

SEQ ID NO: 38643 - protein, 6 aa, synthetic construct
PYEYAW

SEQ ID NO: 38644 - protein, 6 aa, synthetic construct
PYEYAY

SEQ ID NO: 38645 - protein, 6 aa, synthetic construct
PYEYRD

SEQ ID NO: 38646 - protein, 6 aa, synthetic construct
PYEYRE

SEQ ID NO: 38647 - protein, 6 aa, synthetic construct
PYEYRF

SEQ ID NO: 38648 - protein, 6 aa, synthetic construct
PYEYRW

SEQ ID NO: 38649 - protein, 6 aa, synthetic construct
PYEYRY

SEQ ID NO: 38650 - protein, 6 aa, synthetic construct
PYEYND

SEQ ID NO: 38651 - protein, 6 aa, synthetic construct
PYEYNE

SEQ ID NO: 38652 - protein, 6 aa, synthetic construct
PYEYNF

SEQ ID NO: 38653 - protein, 6 aa, synthetic construct
PYEYNW

SEQ ID NO: 38654 - protein, 6 aa, synthetic construct
PYEYNY

SEQ ID NO: 38655 - protein, 6 aa, synthetic construct
PYEYDD

SEQ ID NO: 38656 - protein, 6 aa, synthetic construct
PYEYDE

SEQ ID NO: 38657 - protein, 6 aa, synthetic construct
PYEYDF

SEQ ID NO: 38658 - protein, 6 aa, synthetic construct
PYEYDW

SEQ ID NO: 38659 - protein, 6 aa, synthetic construct
PYEYDY

SEQ ID NO: 38660 - protein, 6 aa, synthetic construct
PYEYCD

SEQ ID NO: 38661 - protein, 6 aa, synthetic construct
PYEYCE

SEQ ID NO: 38662 - protein, 6 aa, synthetic construct
PYEYCF

SEQ ID NO: 38663 - protein, 6 aa, synthetic construct
PYEYCW

SEQ ID NO: 38664 - protein, 6 aa, synthetic construct
PYEYCY

SEQ ID NO: 38665 - protein, 6 aa, synthetic construct
PYEYQD

SEQ ID NO: 38666 - protein, 6 aa, synthetic construct
PYEYQE

SEQ ID NO: 38667 - protein, 6 aa, synthetic construct
PYEYQF

SEQ ID NO: 38668 - protein, 6 aa, synthetic construct
PYEYQW

SEQ ID NO: 38669 - protein, 6 aa, synthetic construct
PYEYQY

SEQ ID NO: 38670 - protein, 6 aa, synthetic construct
PYEYED

SEQ ID NO: 38671 - protein, 6 aa, synthetic construct
PYEYEE

SEQ ID NO: 38672 - protein, 6 aa, synthetic construct
PYEYEF

SEQ ID NO: 38673 - protein, 6 aa, synthetic construct
PYEYEW

SEQ ID NO: 38674 - protein, 6 aa, synthetic construct
PYEYEY

SEQ ID NO: 38675 - protein, 6 aa, synthetic construct
PYEYGD

SEQ ID NO: 38676 - protein, 6 aa, synthetic construct
PYEYGE

SEQ ID NO: 38677 - protein, 6 aa, synthetic construct
PYEYGF

SEQ ID NO: 38678 - protein, 6 aa, synthetic construct
PYEYGW

SEQ ID NO: 38679 - protein, 6 aa, synthetic construct
PYEYGY

SEQ ID NO: 38680 - protein, 6 aa, synthetic construct
PYEYHD

SEQ ID NO: 38681 - protein, 6 aa, synthetic construct
PYEYHE

SEQ ID NO: 38682 - protein, 6 aa, synthetic construct
PYEYHF

SEQ ID NO: 38683 - protein, 6 aa, synthetic construct
PYEYHW

SEQ ID NO: 38684 - protein, 6 aa, synthetic construct
PYEYHY

SEQ ID NO: 38685 - protein, 6 aa, synthetic construct
PYEYID

SEQ ID NO: 38686 - protein, 6 aa, synthetic construct
PYEYIE

SEQ ID NO: 38687 - protein, 6 aa, synthetic construct
PYEYIF

SEQ ID NO: 38688 - protein, 6 aa, synthetic construct
PYEYIW

SEQ ID NO: 38689 - protein, 6 aa, synthetic construct
PYEYIY

SEQ ID NO: 38690 - protein, 6 aa, synthetic construct
PYEYLD

SEQ ID NO: 38691 - protein, 6 aa, synthetic construct
PYEYLE

SEQ ID NO: 38692 - protein, 6 aa, synthetic construct
PYEYLF

SEQ ID NO: 38693 - protein, 6 aa, synthetic construct
PYEYLW

SEQ ID NO: 38694 - protein, 6 aa, synthetic construct
PYEYLY

SEQ ID NO: 38695 - protein, 6 aa, synthetic construct
PYEYKD

SEQ ID NO: 38696 - protein, 6 aa, synthetic construct
PYEYKE

SEQ ID NO: 38697 - protein, 6 aa, synthetic construct
PYEYKF

SEQ ID NO: 38698 - protein, 6 aa, synthetic construct
PYEYKW

SEQ ID NO: 38699 - protein, 6 aa, synthetic construct
PYEYKY

SEQ ID NO: 38700 - protein, 6 aa, synthetic construct
PYEYMD

SEQ ID NO: 38701 - protein, 6 aa, synthetic construct
PYEYME

SEQ ID NO: 38702 - protein, 6 aa, synthetic construct
PYEYMF

SEQ ID NO: 38703 - protein, 6 aa, synthetic construct
PYEYMW

SEQ ID NO: 38704 - protein, 6 aa, synthetic construct
PYEYMY

SEQ ID NO: 38705 - protein, 6 aa, synthetic construct
PYEYFD

SEQ ID NO: 38706 - protein, 6 aa, synthetic construct
PYEYFE

SEQ ID NO: 38707 - protein, 6 aa, synthetic construct
PYEYFF

SEQ ID NO: 38708 - protein, 6 aa, synthetic construct
PYEYFW

SEQ ID NO: 38709 - protein, 6 aa, synthetic construct
PYEYFY

SEQ ID NO: 38710 - protein, 6 aa, synthetic construct
PYEYPD

SEQ ID NO: 38711 - protein, 6 aa, synthetic construct
PYEYPE

SEQ ID NO: 38712 - protein, 6 aa, synthetic construct
PYEYPF

SEQ ID NO: 38713 - protein, 6 aa, synthetic construct
PYEYPW

SEQ ID NO: 38714 - protein, 6 aa, synthetic construct
PYEYPY

SEQ ID NO: 38715 - protein, 6 aa, synthetic construct
PYEYSD

SEQ ID NO: 38716 - protein, 6 aa, synthetic construct
PYEYSE

SEQ ID NO: 38717 - protein, 6 aa, synthetic construct
PYEYSF

SEQ ID NO: 38718 - protein, 6 aa, synthetic construct
PYEYSW

SEQ ID NO: 38719 - protein, 6 aa, synthetic construct
PYEYSY

SEQ ID NO: 38720 - protein, 6 aa, synthetic construct
PYEYTD

SEQ ID NO: 38721 - protein, 6 aa, synthetic construct
PYEYTE

SEQ ID NO: 38722 - protein, 6 aa, synthetic construct
PYEYTF

SEQ ID NO: 38723 - protein, 6 aa, synthetic construct
PYEYTW

SEQ ID NO: 38724 - protein, 6 aa, synthetic construct
PYEYTY

SEQ ID NO: 38725 - protein, 6 aa, synthetic construct
PYEYWD

SEQ ID NO: 38726 - protein, 6 aa, synthetic construct
PYEYWE

SEQ ID NO: 38727 - protein, 6 aa, synthetic construct
PYEYWF

SEQ ID NO: 38728 - protein, 6 aa, synthetic construct
PYEYWW

SEQ ID NO: 38729 - protein, 6 aa, synthetic construct
PYEYWY

SEQ ID NO: 38730 - protein, 6 aa, synthetic construct
PYEYYD

SEQ ID NO: 38731 - protein, 6 aa, synthetic construct
PYEYYE

SEQ ID NO: 38732 - protein, 6 aa, synthetic construct
PYEYYF

SEQ ID NO: 38733 - protein, 6 aa, synthetic construct
PYEYYW

SEQ ID NO: 38734 - protein, 6 aa, synthetic construct
PYEYYY

SEQ ID NO: 38735 - protein, 6 aa, synthetic construct
PYEYVD

SEQ ID NO: 38736 - protein, 6 aa, synthetic construct
PYEYVE

SEQ ID NO: 38737 - protein, 6 aa, synthetic construct
PYEYVF

SEQ ID NO: 38738 - protein, 6 aa, synthetic construct
PYEYVW

SEQ ID NO: 38739 - protein, 6 aa, synthetic construct
PYEYVY

SEQ ID NO: 38740 - protein, 6 aa, synthetic construct
PYEVAD

SEQ ID NO: 38741 - protein, 6 aa, synthetic construct
PYEVAE

SEQ ID NO: 38742 - protein, 6 aa, synthetic construct
PYEVAF

SEQ ID NO: 38743 - protein, 6 aa, synthetic construct
PYEVAW

SEQ ID NO: 38744 - protein, 6 aa, synthetic construct
PYEVAY

SEQ ID NO: 38745 - protein, 6 aa, synthetic construct
PYEVRD

SEQ ID NO: 38746 - protein, 6 aa, synthetic construct
PYEVRE

SEQ ID NO: 38747 - protein, 6 aa, synthetic construct
PYEVRF

SEQ ID NO: 38748 - protein, 6 aa, synthetic construct
PYEVRW

SEQ ID NO: 38749 - protein, 6 aa, synthetic construct
PYEVRY

SEQ ID NO: 38750 - protein, 6 aa, synthetic construct
PYEVND

SEQ ID NO: 38751 - protein, 6 aa, synthetic construct
PYEVNE

SEQ ID NO: 38752 - protein, 6 aa, synthetic construct
PYEVNF

SEQ ID NO: 38753 - protein, 6 aa, synthetic construct
PYEVNW

SEQ ID NO: 38754 - protein, 6 aa, synthetic construct
PYEVNY

SEQ ID NO: 38755 - protein, 6 aa, synthetic construct
PYEVDD

SEQ ID NO: 38756 - protein, 6 aa, synthetic construct
PYEVDE

SEQ ID NO: 38757 - protein, 6 aa, synthetic construct
PYEVDF

SEQ ID NO: 38758 - protein, 6 aa, synthetic construct
PYEVDW

SEQ ID NO: 38759 - protein, 6 aa, synthetic construct
PYEVDY

SEQ ID NO: 38760 - protein, 6 aa, synthetic construct
PYEVCD

SEQ ID NO: 38761 - protein, 6 aa, synthetic construct
PYEVCE

SEQ ID NO: 38762 - protein, 6 aa, synthetic construct
PYEVCF

SEQ ID NO: 38763 - protein, 6 aa, synthetic construct
PYEVCW

SEQ ID NO: 38764 - protein, 6 aa, synthetic construct
PYEVCY

SEQ ID NO: 38765 - protein, 6 aa, synthetic construct
PYEVQD

SEQ ID NO: 38766 - protein, 6 aa, synthetic construct
PYEVQE

SEQ ID NO: 38767 - protein, 6 aa, synthetic construct
PYEVQF

SEQ ID NO: 38768 - protein, 6 aa, synthetic construct
PYEVQW

SEQ ID NO: 38769 - protein, 6 aa, synthetic construct
PYEVQY

SEQ ID NO: 38770 - protein, 6 aa, synthetic construct
PYEVED

SEQ ID NO: 38771 - protein, 6 aa, synthetic construct
PYEVEE

SEQ ID NO: 38772 - protein, 6 aa, synthetic construct
PYEVEF

SEQ ID NO: 38773 - protein, 6 aa, synthetic construct
PYEVEW

SEQ ID NO: 38774 - protein, 6 aa, synthetic construct
PYEVEY

SEQ ID NO: 38775 - protein, 6 aa, synthetic construct
PYEVGD

SEQ ID NO: 38776 - protein, 6 aa, synthetic construct
PYEVGE

SEQ ID NO: 38777 - protein, 6 aa, synthetic construct
PYEVGF

SEQ ID NO: 38778 - protein, 6 aa, synthetic construct
PYEVGW

SEQ ID NO: 38779 - protein, 6 aa, synthetic construct
PYEVGY

SEQ ID NO: 38780 - protein, 6 aa, synthetic construct
PYEVHD

SEQ ID NO: 38781 - protein, 6 aa, synthetic construct
PYEVHE

SEQ ID NO: 38782 - protein, 6 aa, synthetic construct
PYEVHF

SEQ ID NO: 38783 - protein, 6 aa, synthetic construct
PYEVHW

SEQ ID NO: 38784 - protein, 6 aa, synthetic construct
PYEVHY

SEQ ID NO: 38785 - protein, 6 aa, synthetic construct
PYEVID

SEQ ID NO: 38786 - protein, 6 aa, synthetic construct
PYEVIE

SEQ ID NO: 38787 - protein, 6 aa, synthetic construct
PYEVIF

SEQ ID NO: 38788 - protein, 6 aa, synthetic construct
PYEVIW

SEQ ID NO: 38789 - protein, 6 aa, synthetic construct
PYEVIY

SEQ ID NO: 38790 - protein, 6 aa, synthetic construct
PYEVLD

SEQ ID NO: 38791 - protein, 6 aa, synthetic construct
PYEVLE

SEQ ID NO: 38792 - protein, 6 aa, synthetic construct
PYEVLF

SEQ ID NO: 38793 - protein, 6 aa, synthetic construct
PYEVLW

SEQ ID NO: 38794 - protein, 6 aa, synthetic construct
PYEVLY

SEQ ID NO: 38795 - protein, 6 aa, synthetic construct
PYEVKD

SEQ ID NO: 38796 - protein, 6 aa, synthetic construct
PYEVKE

SEQ ID NO: 38797 - protein, 6 aa, synthetic construct
PYEVKF

SEQ ID NO: 38798 - protein, 6 aa, synthetic construct
PYEVKW

SEQ ID NO: 38799 - protein, 6 aa, synthetic construct
PYEVKY

SEQ ID NO: 38800 - protein, 6 aa, synthetic construct
PYEVMD

SEQ ID NO: 38801 - protein, 6 aa, synthetic construct
PYEVME

SEQ ID NO: 38802 - protein, 6 aa, synthetic construct
PYEVMF

SEQ ID NO: 38803 - protein, 6 aa, synthetic construct
PYEVMW

SEQ ID NO: 38804 - protein, 6 aa, synthetic construct
PYEVMY

SEQ ID NO: 38805 - protein, 6 aa, synthetic construct
PYEVFD

SEQ ID NO: 38806 - protein, 6 aa, synthetic construct
PYEVFE

SEQ ID NO: 38807 - protein, 6 aa, synthetic construct
PYEVFF

SEQ ID NO: 38808 - protein, 6 aa, synthetic construct
PYEVFW

SEQ ID NO: 38809 - protein, 6 aa, synthetic construct
PYEVFY

SEQ ID NO: 38810 - protein, 6 aa, synthetic construct
PYEVPD

SEQ ID NO: 38811 - protein, 6 aa, synthetic construct
PYEVPE

SEQ ID NO: 38812 - protein, 6 aa, synthetic construct
PYEVPF

SEQ ID NO: 38813 - protein, 6 aa, synthetic construct
PYEVPW

SEQ ID NO: 38814 - protein, 6 aa, synthetic construct
PYEVPY

SEQ ID NO: 38815 - protein, 6 aa, synthetic construct
PYEVSD

SEQ ID NO: 38816 - protein, 6 aa, synthetic construct
PYEVSE

SEQ ID NO: 38817 - protein, 6 aa, synthetic construct
PYEVSF

SEQ ID NO: 38818 - protein, 6 aa, synthetic construct
PYEVSW

SEQ ID NO: 38819 - protein, 6 aa, synthetic construct
PYEVSY

SEQ ID NO: 38820 - protein, 6 aa, synthetic construct
PYEVTD

SEQ ID NO: 38821 - protein, 6 aa, synthetic construct
PYEVTE

SEQ ID NO: 38822 - protein, 6 aa, synthetic construct
PYEVTF

SEQ ID NO: 38823 - protein, 6 aa, synthetic construct
PYEVTW

SEQ ID NO: 38824 - protein, 6 aa, synthetic construct
PYEVTY

SEQ ID NO: 38825 - protein, 6 aa, synthetic construct
PYEVWD

SEQ ID NO: 38826 - protein, 6 aa, synthetic construct
PYEVWE

SEQ ID NO: 38827 - protein, 6 aa, synthetic construct
PYEVWF

SEQ ID NO: 38828 - protein, 6 aa, synthetic construct
PYEVWW

SEQ ID NO: 38829 - protein, 6 aa, synthetic construct
PYEVWY

SEQ ID NO: 38830 - protein, 6 aa, synthetic construct
PYEVYD

SEQ ID NO: 38831 - protein, 6 aa, synthetic construct
PYEVYE

SEQ ID NO: 38832 - protein, 6 aa, synthetic construct
PYEVYF

SEQ ID NO: 38833 - protein, 6 aa, synthetic construct
PYEVYW

SEQ ID NO: 38834 - protein, 6 aa, synthetic construct
PYEVYY

SEQ ID NO: 38835 - protein, 6 aa, synthetic construct
PYEVVD

SEQ ID NO: 38836 - protein, 6 aa, synthetic construct
PYEVVE

SEQ ID NO: 38837 - protein, 6 aa, synthetic construct
PYEVVF

SEQ ID NO: 38838 - protein, 6 aa, synthetic construct
PYEVVW

SEQ ID NO: 38839 - protein, 6 aa, synthetic construct
PYEVVY

SEQ ID NO: 38840 - protein, 6 aa, synthetic construct
PVEAAD

SEQ ID NO: 38841 - protein, 6 aa, synthetic construct
PVEAAE

SEQ ID NO: 38842 - protein, 6 aa, synthetic construct
PVEAAF

SEQ ID NO: 38843 - protein, 6 aa, synthetic construct
PVEAAW

SEQ ID NO: 38844 - protein, 6 aa, synthetic construct
PVEAAY

SEQ ID NO: 38845 - protein, 6 aa, synthetic construct
PVEARD

SEQ ID NO: 38846 - protein, 6 aa, synthetic construct
PVEARE

SEQ ID NO: 38847 - protein, 6 aa, synthetic construct
PVEARF

SEQ ID NO: 38848 - protein, 6 aa, synthetic construct
PVEARW

SEQ ID NO: 38849 - protein, 6 aa, synthetic construct
PVEARY

SEQ ID NO: 38850 - protein, 6 aa, synthetic construct
PVEAND

SEQ ID NO: 38851 - protein, 6 aa, synthetic construct
PVEANE

SEQ ID NO: 38852 - protein, 6 aa, synthetic construct
PVEANF

SEQ ID NO: 38853 - protein, 6 aa, synthetic construct
PVEANW

SEQ ID NO: 38854 - protein, 6 aa, synthetic construct
PVEANY

SEQ ID NO: 38855 - protein, 6 aa, synthetic construct
PVEADD

SEQ ID NO: 38856 - protein, 6 aa, synthetic construct
PVEADE

SEQ ID NO: 38857 - protein, 6 aa, synthetic construct
PVEADF

SEQ ID NO: 38858 - protein, 6 aa, synthetic construct
PVEADW

SEQ ID NO: 38859 - protein, 6 aa, synthetic construct
PVEADY

SEQ ID NO: 38860 - protein, 6 aa, synthetic construct
PVEACD

SEQ ID NO: 38861 - protein, 6 aa, synthetic construct
PVEACE

SEQ ID NO: 38862 - protein, 6 aa, synthetic construct
PVEACF

SEQ ID NO: 38863 - protein, 6 aa, synthetic construct
PVEACW

SEQ ID NO: 38864 - protein, 6 aa, synthetic construct
PVEACY

SEQ ID NO: 38865 - protein, 6 aa, synthetic construct
PVEAQD

SEQ ID NO: 38866 - protein, 6 aa, synthetic construct
PVEAQE

SEQ ID NO: 38867 - protein, 6 aa, synthetic construct
PVEAQF

SEQ ID NO: 38868 - protein, 6 aa, synthetic construct
PVEAQW

SEQ ID NO: 38869 - protein, 6 aa, synthetic construct
PVEAQY

SEQ ID NO: 38870 - protein, 6 aa, synthetic construct
PVEAED

SEQ ID NO: 38871 - protein, 6 aa, synthetic construct
PVEAEE

SEQ ID NO: 38872 - protein, 6 aa, synthetic construct
PVEAEF

SEQ ID NO: 38873 - protein, 6 aa, synthetic construct
PVEAEW

SEQ ID NO: 38874 - protein, 6 aa, synthetic construct
PVEAEY

SEQ ID NO: 38875 - protein, 6 aa, synthetic construct
PVEAGD

SEQ ID NO: 38876 - protein, 6 aa, synthetic construct
PVEAGE

SEQ ID NO: 38877 - protein, 6 aa, synthetic construct
PVEAGF

SEQ ID NO: 38878 - protein, 6 aa, synthetic construct
PVEAGW

SEQ ID NO: 38879 - protein, 6 aa, synthetic construct
PVEAGY

SEQ ID NO: 38880 - protein, 6 aa, synthetic construct
PVEAHD

SEQ ID NO: 38881 - protein, 6 aa, synthetic construct
PVEAHE

SEQ ID NO: 38882 - protein, 6 aa, synthetic construct
PVEAHF

SEQ ID NO: 38883 - protein, 6 aa, synthetic construct
PVEAHW

SEQ ID NO: 38884 - protein, 6 aa, synthetic construct
PVEAHY

SEQ ID NO: 38885 - protein, 6 aa, synthetic construct
PVEAID

SEQ ID NO: 38886 - protein, 6 aa, synthetic construct
PVEAIE

SEQ ID NO: 38887 - protein, 6 aa, synthetic construct
PVEAIF

SEQ ID NO: 38888 - protein, 6 aa, synthetic construct
PVEAIW

SEQ ID NO: 38889 - protein, 6 aa, synthetic construct
PVEAIY

SEQ ID NO: 38890 - protein, 6 aa, synthetic construct
PVEALD

SEQ ID NO: 38891 - protein, 6 aa, synthetic construct
PVEALE

SEQ ID NO: 38892 - protein, 6 aa, synthetic construct
PVEALF

SEQ ID NO: 38893 - protein, 6 aa, synthetic construct
PVEALW

SEQ ID NO: 38894 - protein, 6 aa, synthetic construct
PVEALY

SEQ ID NO: 38895 - protein, 6 aa, synthetic construct
PVEAKD

SEQ ID NO: 38896 - protein, 6 aa, synthetic construct
PVEAKE

SEQ ID NO: 38897 - protein, 6 aa, synthetic construct
PVEAKF

SEQ ID NO: 38898 - protein, 6 aa, synthetic construct
PVEAKW

SEQ ID NO: 38899 - protein, 6 aa, synthetic construct
PVEAKY

SEQ ID NO: 38900 - protein, 6 aa, synthetic construct
PVEAMD

SEQ ID NO: 38901 - protein, 6 aa, synthetic construct
PVEAME

SEQ ID NO: 38902 - protein, 6 aa, synthetic construct
PVEAMF

SEQ ID NO: 38903 - protein, 6 aa, synthetic construct
PVEAMW

SEQ ID NO: 38904 - protein, 6 aa, synthetic construct
PVEAMY

SEQ ID NO: 38905 - protein, 6 aa, synthetic construct
PVEAFD

SEQ ID NO: 38906 - protein, 6 aa, synthetic construct
PVEAFE

SEQ ID NO: 38907 - protein, 6 aa, synthetic construct
PVEAFF

SEQ ID NO: 38908 - protein, 6 aa, synthetic construct
PVEAFW

SEQ ID NO: 38909 - protein, 6 aa, synthetic construct
PVEAFY

SEQ ID NO: 38910 - protein, 6 aa, synthetic construct
PVEAPD

SEQ ID NO: 38911 - protein, 6 aa, synthetic construct
PVEAPE

SEQ ID NO: 38912 - protein, 6 aa, synthetic construct
PVEAPF

SEQ ID NO: 38913 - protein, 6 aa, synthetic construct
PVEAPW

SEQ ID NO: 38914 - protein, 6 aa, synthetic construct
PVEAPY

SEQ ID NO: 38915 - protein, 6 aa, synthetic construct
PVEASD

SEQ ID NO: 38916 - protein, 6 aa, synthetic construct
PVEASE

SEQ ID NO: 38917 - protein, 6 aa, synthetic construct
PVEASF

SEQ ID NO: 38918 - protein, 6 aa, synthetic construct
PVEASW

SEQ ID NO: 38919 - protein, 6 aa, synthetic construct
PVEASY

SEQ ID NO: 38920 - protein, 6 aa, synthetic construct
PVEATD

SEQ ID NO: 38921 - protein, 6 aa, synthetic construct
PVEATE

SEQ ID NO: 38922 - protein, 6 aa, synthetic construct
PVEATF

SEQ ID NO: 38923 - protein, 6 aa, synthetic construct
PVEATW

SEQ ID NO: 38924 - protein, 6 aa, synthetic construct
PVEATY

SEQ ID NO: 38925 - protein, 6 aa, synthetic construct
PVEAWD

SEQ ID NO: 38926 - protein, 6 aa, synthetic construct
PVEAWE

SEQ ID NO: 38927 - protein, 6 aa, synthetic construct
PVEAWF

SEQ ID NO: 38928 - protein, 6 aa, synthetic construct
PVEAWW

SEQ ID NO: 38929 - protein, 6 aa, synthetic construct
PVEAWY

SEQ ID NO: 38930 - protein, 6 aa, synthetic construct
PVEAYD

SEQ ID NO: 38931 - protein, 6 aa, synthetic construct
PVEAYE

SEQ ID NO: 38932 - protein, 6 aa, synthetic construct
PVEAYF

SEQ ID NO: 38933 - protein, 6 aa, synthetic construct
PVEAYW

SEQ ID NO: 38934 - protein, 6 aa, synthetic construct
PVEAYY

SEQ ID NO: 38935 - protein, 6 aa, synthetic construct
PVEAVD

SEQ ID NO: 38936 - protein, 6 aa, synthetic construct
PVEAVE

SEQ ID NO: 38937 - protein, 6 aa, synthetic construct
PVEAVF

SEQ ID NO: 38938 - protein, 6 aa, synthetic construct
PVEAVW

SEQ ID NO: 38939 - protein, 6 aa, synthetic construct
PVEAVY

SEQ ID NO: 38940 - protein, 6 aa, synthetic construct
PVERAD

SEQ ID NO: 38941 - protein, 6 aa, synthetic construct
PVERAE

SEQ ID NO: 38942 - protein, 6 aa, synthetic construct
PVERAF

SEQ ID NO: 38943 - protein, 6 aa, synthetic construct
PVERAW

SEQ ID NO: 38944 - protein, 6 aa, synthetic construct
PVERAY

SEQ ID NO: 38945 - protein, 6 aa, synthetic construct
PVERRD

SEQ ID NO: 38946 - protein, 6 aa, synthetic construct
PVERRE

SEQ ID NO: 38947 - protein, 6 aa, synthetic construct
PVERRF

SEQ ID NO: 38948 - protein, 6 aa, synthetic construct
PVERRW

SEQ ID NO: 38949 - protein, 6 aa, synthetic construct
PVERRY

SEQ ID NO: 38950 - protein, 6 aa, synthetic construct
PVERND

SEQ ID NO: 38951 - protein, 6 aa, synthetic construct
PVERNE

SEQ ID NO: 38952 - protein, 6 aa, synthetic construct
PVERNF

SEQ ID NO: 38953 - protein, 6 aa, synthetic construct
PVERNW

SEQ ID NO: 38954 - protein, 6 aa, synthetic construct
PVERNY

SEQ ID NO: 38955 - protein, 6 aa, synthetic construct
PVERDD

SEQ ID NO: 38956 - protein, 6 aa, synthetic construct
PVERDE

SEQ ID NO: 38957 - protein, 6 aa, synthetic construct
PVERDF

SEQ ID NO: 38958 - protein, 6 aa, synthetic construct
PVERDW

SEQ ID NO: 38959 - protein, 6 aa, synthetic construct
PVERDY

SEQ ID NO: 38960 - protein, 6 aa, synthetic construct
PVERCD

SEQ ID NO: 38961 - protein, 6 aa, synthetic construct
PVERCE

SEQ ID NO: 38962 - protein, 6 aa, synthetic construct
PVERCF

SEQ ID NO: 38963 - protein, 6 aa, synthetic construct
PVERCW

SEQ ID NO: 38964 - protein, 6 aa, synthetic construct
PVERCY

SEQ ID NO: 38965 - protein, 6 aa, synthetic construct
PVERQD

SEQ ID NO: 38966 - protein, 6 aa, synthetic construct
PVERQE

SEQ ID NO: 38967 - protein, 6 aa, synthetic construct
PVERQF

SEQ ID NO: 38968 - protein, 6 aa, synthetic construct
PVERQW

SEQ ID NO: 38969 - protein, 6 aa, synthetic construct
PVERQY

SEQ ID NO: 38970 - protein, 6 aa, synthetic construct
PVERED

SEQ ID NO: 38971 - protein, 6 aa, synthetic construct
PVEREE

SEQ ID NO: 38972 - protein, 6 aa, synthetic construct
PVEREF

SEQ ID NO: 38973 - protein, 6 aa, synthetic construct
PVEREW

SEQ ID NO: 38974 - protein, 6 aa, synthetic construct
PVEREY

SEQ ID NO: 38975 - protein, 6 aa, synthetic construct
PVERGD

SEQ ID NO: 38976 - protein, 6 aa, synthetic construct
PVERGE

SEQ ID NO: 38977 - protein, 6 aa, synthetic construct
PVERGF

SEQ ID NO: 38978 - protein, 6 aa, synthetic construct
PVERGW

SEQ ID NO: 38979 - protein, 6 aa, synthetic construct
PVERGY

SEQ ID NO: 38980 - protein, 6 aa, synthetic construct
PVERHD

SEQ ID NO: 38981 - protein, 6 aa, synthetic construct
PVERHE

SEQ ID NO: 38982 - protein, 6 aa, synthetic construct
PVERHF

SEQ ID NO: 38983 - protein, 6 aa, synthetic construct
PVERHW

SEQ ID NO: 38984 - protein, 6 aa, synthetic construct
PVERHY

SEQ ID NO: 38985 - protein, 6 aa, synthetic construct
PVERID

SEQ ID NO: 38986 - protein, 6 aa, synthetic construct
PVERIE

SEQ ID NO: 38987 - protein, 6 aa, synthetic construct
PVERIF

SEQ ID NO: 38988 - protein, 6 aa, synthetic construct
PVERIW

SEQ ID NO: 38989 - protein, 6 aa, synthetic construct
PVERIY

SEQ ID NO: 38990 - protein, 6 aa, synthetic construct
PVERLD

SEQ ID NO: 38991 - protein, 6 aa, synthetic construct
PVERLE

SEQ ID NO: 38992 - protein, 6 aa, synthetic construct
PVERLF

SEQ ID NO: 38993 - protein, 6 aa, synthetic construct
PVERLW

SEQ ID NO: 38994 - protein, 6 aa, synthetic construct
PVERLY

SEQ ID NO: 38995 - protein, 6 aa, synthetic construct
PVERKD

SEQ ID NO: 38996 - protein, 6 aa, synthetic construct
PVERKE

SEQ ID NO: 38997 - protein, 6 aa, synthetic construct
PVERKF

SEQ ID NO: 38998 - protein, 6 aa, synthetic construct
PVERKW

SEQ ID NO: 38999 - protein, 6 aa, synthetic construct
PVERKY

SEQ ID NO: 39000 - protein, 6 aa, synthetic construct
PVERMD

SEQ ID NO: 39001 - protein, 6 aa, synthetic construct
PVERME

SEQ ID NO: 39002 - protein, 6 aa, synthetic construct
PVERMF

SEQ ID NO: 39003 - protein, 6 aa, synthetic construct
PVERMW

SEQ ID NO: 39004 - protein, 6 aa, synthetic construct
PVERMY

SEQ ID NO: 39005 - protein, 6 aa, synthetic construct
PVERFD

SEQ ID NO: 39006 - protein, 6 aa, synthetic construct
PVERFE

SEQ ID NO: 39007 - protein, 6 aa, synthetic construct
PVERFF

SEQ ID NO: 39008 - protein, 6 aa, synthetic construct
PVERFW

SEQ ID NO: 39009 - protein, 6 aa, synthetic construct
PVERFY

SEQ ID NO: 39010 - protein, 6 aa, synthetic construct
PVERPD

SEQ ID NO: 39011 - protein, 6 aa, synthetic construct
PVERPE

SEQ ID NO: 39012 - protein, 6 aa, synthetic construct
PVERPF

SEQ ID NO: 39013 - protein, 6 aa, synthetic construct
PVERPW

SEQ ID NO: 39014 - protein, 6 aa, synthetic construct
PVERPY

SEQ ID NO: 39015 - protein, 6 aa, synthetic construct
PVERSD

SEQ ID NO: 39016 - protein, 6 aa, synthetic construct
PVERSE

SEQ ID NO: 39017 - protein, 6 aa, synthetic construct
PVERSF

SEQ ID NO: 39018 - protein, 6 aa, synthetic construct
PVERSW

SEQ ID NO: 39019 - protein, 6 aa, synthetic construct
PVERSY

SEQ ID NO: 39020 - protein, 6 aa, synthetic construct
PVERTD

SEQ ID NO: 39021 - protein, 6 aa, synthetic construct
PVERTE

SEQ ID NO: 39022 - protein, 6 aa, synthetic construct
PVERTF

SEQ ID NO: 39023 - protein, 6 aa, synthetic construct
PVERTW

SEQ ID NO: 39024 - protein, 6 aa, synthetic construct
PVERTY

SEQ ID NO: 39025 - protein, 6 aa, synthetic construct
PVERWD

SEQ ID NO: 39026 - protein, 6 aa, synthetic construct
PVERWE

SEQ ID NO: 39027 - protein, 6 aa, synthetic construct
PVERWF

SEQ ID NO: 39028 - protein, 6 aa, synthetic construct
PVERWW

SEQ ID NO: 39029 - protein, 6 aa, synthetic construct
PVERWY

SEQ ID NO: 39030 - protein, 6 aa, synthetic construct
PVERYD

SEQ ID NO: 39031 - protein, 6 aa, synthetic construct
PVERYE

SEQ ID NO: 39032 - protein, 6 aa, synthetic construct
PVERYF

SEQ ID NO: 39033 - protein, 6 aa, synthetic construct
PVERYW

SEQ ID NO: 39034 - protein, 6 aa, synthetic construct
PVERYY

SEQ ID NO: 39035 - protein, 6 aa, synthetic construct
PVERVD

SEQ ID NO: 39036 - protein, 6 aa, synthetic construct
PVERVE

SEQ ID NO: 39037 - protein, 6 aa, synthetic construct
PVERVF

SEQ ID NO: 39038 - protein, 6 aa, synthetic construct
PVERVW

SEQ ID NO: 39039 - protein, 6 aa, synthetic construct
PVERVY

SEQ ID NO: 39040 - protein, 6 aa, synthetic construct
PVENAD

SEQ ID NO: 39041 - protein, 6 aa, synthetic construct
PVENAE

SEQ ID NO: 39042 - protein, 6 aa, synthetic construct
PVENAF

SEQ ID NO: 39043 - protein, 6 aa, synthetic construct
PVENAW

SEQ ID NO: 39044 - protein, 6 aa, synthetic construct
PVENAY

SEQ ID NO: 39045 - protein, 6 aa, synthetic construct
PVENRD

SEQ ID NO: 39046 - protein, 6 aa, synthetic construct
PVENRE

SEQ ID NO: 39047 - protein, 6 aa, synthetic construct
PVENRF

SEQ ID NO: 39048 - protein, 6 aa, synthetic construct
PVENRW

SEQ ID NO: 39049 - protein, 6 aa, synthetic construct
PVENRY

SEQ ID NO: 39050 - protein, 6 aa, synthetic construct
PVENND

SEQ ID NO: 39051 - protein, 6 aa, synthetic construct
PVENNE

SEQ ID NO: 39052 - protein, 6 aa, synthetic construct
PVENNF

SEQ ID NO: 39053 - protein, 6 aa, synthetic construct
PVENNW

SEQ ID NO: 39054 - protein, 6 aa, synthetic construct
PVENNY

SEQ ID NO: 39055 - protein, 6 aa, synthetic construct
PVENDD

SEQ ID NO: 39056 - protein, 6 aa, synthetic construct
PVENDE

SEQ ID NO: 39057 - protein, 6 aa, synthetic construct
PVENDF

SEQ ID NO: 39058 - protein, 6 aa, synthetic construct
PVENDW

SEQ ID NO: 39059 - protein, 6 aa, synthetic construct
PVENDY

SEQ ID NO: 39060 - protein, 6 aa, synthetic construct
PVENCD

SEQ ID NO: 39061 - protein, 6 aa, synthetic construct
PVENCE

SEQ ID NO: 39062 - protein, 6 aa, synthetic construct
PVENCF

SEQ ID NO: 39063 - protein, 6 aa, synthetic construct
PVENCW

SEQ ID NO: 39064 - protein, 6 aa, synthetic construct
PVENCY

SEQ ID NO: 39065 - protein, 6 aa, synthetic construct
PVENQD

SEQ ID NO: 39066 - protein, 6 aa, synthetic construct
PVENQE

SEQ ID NO: 39067 - protein, 6 aa, synthetic construct
PVENQF

SEQ ID NO: 39068 - protein, 6 aa, synthetic construct
PVENQW

SEQ ID NO: 39069 - protein, 6 aa, synthetic construct
PVENQY

SEQ ID NO: 39070 - protein, 6 aa, synthetic construct
PVENED

SEQ ID NO: 39071 - protein, 6 aa, synthetic construct
PVENEE

SEQ ID NO: 39072 - protein, 6 aa, synthetic construct
PVENEF

SEQ ID NO: 39073 - protein, 6 aa, synthetic construct
PVENEW

SEQ ID NO: 39074 - protein, 6 aa, synthetic construct
PVENEY

SEQ ID NO: 39075 - protein, 6 aa, synthetic construct
PVENGD

SEQ ID NO: 39076 - protein, 6 aa, synthetic construct
PVENGE

SEQ ID NO: 39077 - protein, 6 aa, synthetic construct
PVENGF

SEQ ID NO: 39078 - protein, 6 aa, synthetic construct
PVENGW

SEQ ID NO: 39079 - protein, 6 aa, synthetic construct
PVENGY

SEQ ID NO: 39080 - protein, 6 aa, synthetic construct
PVENHD

SEQ ID NO: 39081 - protein, 6 aa, synthetic construct
PVENHE

SEQ ID NO: 39082 - protein, 6 aa, synthetic construct
PVENHF

SEQ ID NO: 39083 - protein, 6 aa, synthetic construct
PVENHW

SEQ ID NO: 39084 - protein, 6 aa, synthetic construct
PVENHY

SEQ ID NO: 39085 - protein, 6 aa, synthetic construct
PVENID

SEQ ID NO: 39086 - protein, 6 aa, synthetic construct
PVENIE

SEQ ID NO: 39087 - protein, 6 aa, synthetic construct
PVENIF

SEQ ID NO: 39088 - protein, 6 aa, synthetic construct
PVENIW

SEQ ID NO: 39089 - protein, 6 aa, synthetic construct
PVENIY

SEQ ID NO: 39090 - protein, 6 aa, synthetic construct
PVENLD

SEQ ID NO: 39091 - protein, 6 aa, synthetic construct
PVENLE

SEQ ID NO: 39092 - protein, 6 aa, synthetic construct
PVENLF

SEQ ID NO: 39093 - protein, 6 aa, synthetic construct
PVENLW

SEQ ID NO: 39094 - protein, 6 aa, synthetic construct
PVENLY

SEQ ID NO: 39095 - protein, 6 aa, synthetic construct
PVENKD

SEQ ID NO: 39096 - protein, 6 aa, synthetic construct
PVENKE

SEQ ID NO: 39097 - protein, 6 aa, synthetic construct
PVENKF

SEQ ID NO: 39098 - protein, 6 aa, synthetic construct
PVENKW

SEQ ID NO: 39099 - protein, 6 aa, synthetic construct
PVENKY

SEQ ID NO: 39100 - protein, 6 aa, synthetic construct
PVENMD

SEQ ID NO: 39101 - protein, 6 aa, synthetic construct
PVENME

SEQ ID NO: 39102 - protein, 6 aa, synthetic construct
PVENMF

SEQ ID NO: 39103 - protein, 6 aa, synthetic construct
PVENMW

SEQ ID NO: 39104 - protein, 6 aa, synthetic construct
PVENMY

SEQ ID NO: 39105 - protein, 6 aa, synthetic construct
PVENFD

SEQ ID NO: 39106 - protein, 6 aa, synthetic construct
PVENFE

SEQ ID NO: 39107 - protein, 6 aa, synthetic construct
PVENFF

SEQ ID NO: 39108 - protein, 6 aa, synthetic construct
PVENFW

SEQ ID NO: 39109 - protein, 6 aa, synthetic construct
PVENFY

SEQ ID NO: 39110 - protein, 6 aa, synthetic construct
PVENPD

SEQ ID NO: 39111 - protein, 6 aa, synthetic construct
PVENPE

SEQ ID NO: 39112 - protein, 6 aa, synthetic construct
PVENPF

SEQ ID NO: 39113 - protein, 6 aa, synthetic construct
PVENPW

SEQ ID NO: 39114 - protein, 6 aa, synthetic construct
PVENPY

SEQ ID NO: 39115 - protein, 6 aa, synthetic construct
PVENSD

SEQ ID NO: 39116 - protein, 6 aa, synthetic construct
PVENSE

SEQ ID NO: 39117 - protein, 6 aa, synthetic construct
PVENSF

SEQ ID NO: 39118 - protein, 6 aa, synthetic construct
PVENSW

SEQ ID NO: 39119 - protein, 6 aa, synthetic construct
PVENSY

SEQ ID NO: 39120 - protein, 6 aa, synthetic construct
PVENTD

SEQ ID NO: 39121 - protein, 6 aa, synthetic construct
PVENTE

SEQ ID NO: 39122 - protein, 6 aa, synthetic construct
PVENTF

SEQ ID NO: 39123 - protein, 6 aa, synthetic construct
PVENTW

SEQ ID NO: 39124 - protein, 6 aa, synthetic construct
PVENTY

SEQ ID NO: 39125 - protein, 6 aa, synthetic construct
PVENWD

SEQ ID NO: 39126 - protein, 6 aa, synthetic construct
PVENWE

SEQ ID NO: 39127 - protein, 6 aa, synthetic construct
PVENWF

SEQ ID NO: 39128 - protein, 6 aa, synthetic construct
PVENWW

SEQ ID NO: 39129 - protein, 6 aa, synthetic construct
PVENWY

SEQ ID NO: 39130 - protein, 6 aa, synthetic construct
PVENYD

SEQ ID NO: 39131 - protein, 6 aa, synthetic construct
PVENYE

SEQ ID NO: 39132 - protein, 6 aa, synthetic construct
PVENYF

SEQ ID NO: 39133 - protein, 6 aa, synthetic construct
PVENYW

SEQ ID NO: 39134 - protein, 6 aa, synthetic construct
PVENYY

SEQ ID NO: 39135 - protein, 6 aa, synthetic construct
PVENVD

SEQ ID NO: 39136 - protein, 6 aa, synthetic construct
PVENVE

SEQ ID NO: 39137 - protein, 6 aa, synthetic construct
PVENVF

SEQ ID NO: 39138 - protein, 6 aa, synthetic construct
PVENVW

SEQ ID NO: 39139 - protein, 6 aa, synthetic construct
PVENVY

SEQ ID NO: 39140 - protein, 6 aa, synthetic construct
PVEDAD

SEQ ID NO: 39141 - protein, 6 aa, synthetic construct
PVEDAE

SEQ ID NO: 39142 - protein, 6 aa, synthetic construct
PVEDAF

SEQ ID NO: 39143 - protein, 6 aa, synthetic construct
PVEDAW

SEQ ID NO: 39144 - protein, 6 aa, synthetic construct
PVEDAY

SEQ ID NO: 39145 - protein, 6 aa, synthetic construct
PVEDRD

SEQ ID NO: 39146 - protein, 6 aa, synthetic construct
PVEDRE

SEQ ID NO: 39147 - protein, 6 aa, synthetic construct
PVEDRF

SEQ ID NO: 39148 - protein, 6 aa, synthetic construct
PVEDRW

SEQ ID NO: 39149 - protein, 6 aa, synthetic construct
PVEDRY

SEQ ID NO: 39150 - protein, 6 aa, synthetic construct
PVEDND

SEQ ID NO: 39151 - protein, 6 aa, synthetic construct
PVEDNE

SEQ ID NO: 39152 - protein, 6 aa, synthetic construct
PVEDNF

SEQ ID NO: 39153 - protein, 6 aa, synthetic construct
PVEDNW

SEQ ID NO: 39154 - protein, 6 aa, synthetic construct
PVEDNY

SEQ ID NO: 39155 - protein, 6 aa, synthetic construct
PVEDDD

SEQ ID NO: 39156 - protein, 6 aa, synthetic construct
PVEDDE

SEQ ID NO: 39157 - protein, 6 aa, synthetic construct
PVEDDF

SEQ ID NO: 39158 - protein, 6 aa, synthetic construct
PVEDDW

SEQ ID NO: 39159 - protein, 6 aa, synthetic construct
PVEDDY

SEQ ID NO: 39160 - protein, 6 aa, synthetic construct
PVEDCD

SEQ ID NO: 39161 - protein, 6 aa, synthetic construct
PVEDCE

SEQ ID NO: 39162 - protein, 6 aa, synthetic construct
PVEDCF

SEQ ID NO: 39163 - protein, 6 aa, synthetic construct
PVEDCW

SEQ ID NO: 39164 - protein, 6 aa, synthetic construct
PVEDCY

SEQ ID NO: 39165 - protein, 6 aa, synthetic construct
PVEDQD

SEQ ID NO: 39166 - protein, 6 aa, synthetic construct
PVEDQE

SEQ ID NO: 39167 - protein, 6 aa, synthetic construct
PVEDQF

SEQ ID NO: 39168 - protein, 6 aa, synthetic construct
PVEDQW

SEQ ID NO: 39169 - protein, 6 aa, synthetic construct
PVEDQY

SEQ ID NO: 39170 - protein, 6 aa, synthetic construct
PVEDED

SEQ ID NO: 39171 - protein, 6 aa, synthetic construct
PVEDEE

SEQ ID NO: 39172 - protein, 6 aa, synthetic construct
PVEDEF

SEQ ID NO: 39173 - protein, 6 aa, synthetic construct
PVEDEW

SEQ ID NO: 39174 - protein, 6 aa, synthetic construct
PVEDEY

SEQ ID NO: 39175 - protein, 6 aa, synthetic construct
PVEDGD

SEQ ID NO: 39176 - protein, 6 aa, synthetic construct
PVEDGE

SEQ ID NO: 39177 - protein, 6 aa, synthetic construct
PVEDGF

SEQ ID NO: 39178 - protein, 6 aa, synthetic construct
PVEDGW

SEQ ID NO: 39179 - protein, 6 aa, synthetic construct
PVEDGY

SEQ ID NO: 39180 - protein, 6 aa, synthetic construct
PVEDHD

SEQ ID NO: 39181 - protein, 6 aa, synthetic construct
PVEDHE

SEQ ID NO: 39182 - protein, 6 aa, synthetic construct
PVEDHF

SEQ ID NO: 39183 - protein, 6 aa, synthetic construct
PVEDHW

SEQ ID NO: 39184 - protein, 6 aa, synthetic construct
PVEDHY

SEQ ID NO: 39185 - protein, 6 aa, synthetic construct
PVEDID

SEQ ID NO: 39186 - protein, 6 aa, synthetic construct
PVEDIE

SEQ ID NO: 39187 - protein, 6 aa, synthetic construct
PVEDIF

SEQ ID NO: 39188 - protein, 6 aa, synthetic construct
PVEDIW

SEQ ID NO: 39189 - protein, 6 aa, synthetic construct
PVEDIY

SEQ ID NO: 39190 - protein, 6 aa, synthetic construct
PVEDLD

SEQ ID NO: 39191 - protein, 6 aa, synthetic construct
PVEDLE

SEQ ID NO: 39192 - protein, 6 aa, synthetic construct
PVEDLF

SEQ ID NO: 39193 - protein, 6 aa, synthetic construct
PVEDLW

SEQ ID NO: 39194 - protein, 6 aa, synthetic construct
PVEDLY

SEQ ID NO: 39195 - protein, 6 aa, synthetic construct
PVEDKD

SEQ ID NO: 39196 - protein, 6 aa, synthetic construct
PVEDKE

SEQ ID NO: 39197 - protein, 6 aa, synthetic construct
PVEDKF

SEQ ID NO: 39198 - protein, 6 aa, synthetic construct
PVEDKW

SEQ ID NO: 39199 - protein, 6 aa, synthetic construct
PVEDKY

SEQ ID NO: 39200 - protein, 6 aa, synthetic construct
PVEDMD

SEQ ID NO: 39201 - protein, 6 aa, synthetic construct
PVEDME

SEQ ID NO: 39202 - protein, 6 aa, synthetic construct
PVEDMF

SEQ ID NO: 39203 - protein, 6 aa, synthetic construct
PVEDMW

SEQ ID NO: 39204 - protein, 6 aa, synthetic construct
PVEDMY

SEQ ID NO: 39205 - protein, 6 aa, synthetic construct
PVEDFD

SEQ ID NO: 39206 - protein, 6 aa, synthetic construct
PVEDFE

SEQ ID NO: 39207 - protein, 6 aa, synthetic construct
PVEDFF

SEQ ID NO: 39208 - protein, 6 aa, synthetic construct
PVEDFW

SEQ ID NO: 39209 - protein, 6 aa, synthetic construct
PVEDFY

SEQ ID NO: 39210 - protein, 6 aa, synthetic construct
PVEDPD

SEQ ID NO: 39211 - protein, 6 aa, synthetic construct
PVEDPE

SEQ ID NO: 39212 - protein, 6 aa, synthetic construct
PVEDPF

SEQ ID NO: 39213 - protein, 6 aa, synthetic construct
PVEDPW

SEQ ID NO: 39214 - protein, 6 aa, synthetic construct
PVEDPY

SEQ ID NO: 39215 - protein, 6 aa, synthetic construct
PVEDSD

SEQ ID NO: 39216 - protein, 6 aa, synthetic construct
PVEDSE

SEQ ID NO: 39217 - protein, 6 aa, synthetic construct
PVEDSF

SEQ ID NO: 39218 - protein, 6 aa, synthetic construct
PVEDSW

SEQ ID NO: 39219 - protein, 6 aa, synthetic construct
PVEDSY

SEQ ID NO: 39220 - protein, 6 aa, synthetic construct
PVEDTD

SEQ ID NO: 39221 - protein, 6 aa, synthetic construct
PVEDTE

SEQ ID NO: 39222 - protein, 6 aa, synthetic construct
PVEDTF

SEQ ID NO: 39223 - protein, 6 aa, synthetic construct
PVEDTW

SEQ ID NO: 39224 - protein, 6 aa, synthetic construct
PVEDTY

SEQ ID NO: 39225 - protein, 6 aa, synthetic construct
PVEDWD

SEQ ID NO: 39226 - protein, 6 aa, synthetic construct
PVEDWE

SEQ ID NO: 39227 - protein, 6 aa, synthetic construct
PVEDWF

SEQ ID NO: 39228 - protein, 6 aa, synthetic construct
PVEDWW

SEQ ID NO: 39229 - protein, 6 aa, synthetic construct
PVEDWY

SEQ ID NO: 39230 - protein, 6 aa, synthetic construct
PVEDYD

SEQ ID NO: 39231 - protein, 6 aa, synthetic construct
PVEDYE

SEQ ID NO: 39232 - protein, 6 aa, synthetic construct
PVEDYF

SEQ ID NO: 39233 - protein, 6 aa, synthetic construct
PVEDYW

SEQ ID NO: 39234 - protein, 6 aa, synthetic construct
PVEDYY

SEQ ID NO: 39235 - protein, 6 aa, synthetic construct
PVEDVD

SEQ ID NO: 39236 - protein, 6 aa, synthetic construct
PVEDVE

SEQ ID NO: 39237 - protein, 6 aa, synthetic construct
PVEDVF

SEQ ID NO: 39238 - protein, 6 aa, synthetic construct
PVEDVW

SEQ ID NO: 39239 - protein, 6 aa, synthetic construct
PVEDVY

SEQ ID NO: 39240 - protein, 6 aa, synthetic construct
PVECAD

SEQ ID NO: 39241 - protein, 6 aa, synthetic construct
PVECAE

SEQ ID NO: 39242 - protein, 6 aa, synthetic construct
PVECAF

SEQ ID NO: 39243 - protein, 6 aa, synthetic construct
PVECAW

SEQ ID NO: 39244 - protein, 6 aa, synthetic construct
PVECAY

SEQ ID NO: 39245 - protein, 6 aa, synthetic construct
PVECRD

SEQ ID NO: 39246 - protein, 6 aa, synthetic construct
PVECRE

SEQ ID NO: 39247 - protein, 6 aa, synthetic construct
PVECRF

SEQ ID NO: 39248 - protein, 6 aa, synthetic construct
PVECRW

SEQ ID NO: 39249 - protein, 6 aa, synthetic construct
PVECRY

SEQ ID NO: 39250 - protein, 6 aa, synthetic construct
PVECND

SEQ ID NO: 39251 - protein, 6 aa, synthetic construct
PVECNE

SEQ ID NO: 39252 - protein, 6 aa, synthetic construct
PVECNF

SEQ ID NO: 39253 - protein, 6 aa, synthetic construct
PVECNW

SEQ ID NO: 39254 - protein, 6 aa, synthetic construct
PVECNY

SEQ ID NO: 39255 - protein, 6 aa, synthetic construct
PVECDD

SEQ ID NO: 39256 - protein, 6 aa, synthetic construct
PVECDE

SEQ ID NO: 39257 - protein, 6 aa, synthetic construct
PVECDF

SEQ ID NO: 39258 - protein, 6 aa, synthetic construct
PVECDW

SEQ ID NO: 39259 - protein, 6 aa, synthetic construct
PVECDY

SEQ ID NO: 39260 - protein, 6 aa, synthetic construct
PVECCD

SEQ ID NO: 39261 - protein, 6 aa, synthetic construct
PVECCE

SEQ ID NO: 39262 - protein, 6 aa, synthetic construct
PVECCF

SEQ ID NO: 39263 - protein, 6 aa, synthetic construct
PVECCW

SEQ ID NO: 39264 - protein, 6 aa, synthetic construct
PVECCY

SEQ ID NO: 39265 - protein, 6 aa, synthetic construct
PVECQD

SEQ ID NO: 39266 - protein, 6 aa, synthetic construct
PVECQE

SEQ ID NO: 39267 - protein, 6 aa, synthetic construct
PVECQF

SEQ ID NO: 39268 - protein, 6 aa, synthetic construct
PVECQW

SEQ ID NO: 39269 - protein, 6 aa, synthetic construct
PVECQY

SEQ ID NO: 39270 - protein, 6 aa, synthetic construct
PVECED

SEQ ID NO: 39271 - protein, 6 aa, synthetic construct
PVECEE

SEQ ID NO: 39272 - protein, 6 aa, synthetic construct
PVECEF

SEQ ID NO: 39273 - protein, 6 aa, synthetic construct
PVECEW

SEQ ID NO: 39274 - protein, 6 aa, synthetic construct
PVECEY

SEQ ID NO: 39275 - protein, 6 aa, synthetic construct
PVECGD

SEQ ID NO: 39276 - protein, 6 aa, synthetic construct
PVECGE

SEQ ID NO: 39277 - protein, 6 aa, synthetic construct
PVECGF

SEQ ID NO: 39278 - protein, 6 aa, synthetic construct
PVECGW

SEQ ID NO: 39279 - protein, 6 aa, synthetic construct
PVECGY

SEQ ID NO: 39280 - protein, 6 aa, synthetic construct
PVECHD

SEQ ID NO: 39281 - protein, 6 aa, synthetic construct
PVECHE

SEQ ID NO: 39282 - protein, 6 aa, synthetic construct
PVECHF

SEQ ID NO: 39283 - protein, 6 aa, synthetic construct
PVECHW

SEQ ID NO: 39284 - protein, 6 aa, synthetic construct
PVECHY

SEQ ID NO: 39285 - protein, 6 aa, synthetic construct
PVECID

SEQ ID NO: 39286 - protein, 6 aa, synthetic construct
PVECIE

SEQ ID NO: 39287 - protein, 6 aa, synthetic construct
PVECIF

SEQ ID NO: 39288 - protein, 6 aa, synthetic construct
PVECIW

SEQ ID NO: 39289 - protein, 6 aa, synthetic construct
PVECIY

SEQ ID NO: 39290 - protein, 6 aa, synthetic construct
PVECLD

SEQ ID NO: 39291 - protein, 6 aa, synthetic construct
PVECLE

SEQ ID NO: 39292 - protein, 6 aa, synthetic construct
PVECLF

SEQ ID NO: 39293 - protein, 6 aa, synthetic construct
PVECLW

SEQ ID NO: 39294 - protein, 6 aa, synthetic construct
PVECLY

SEQ ID NO: 39295 - protein, 6 aa, synthetic construct
PVECKD

SEQ ID NO: 39296 - protein, 6 aa, synthetic construct
PVECKE

SEQ ID NO: 39297 - protein, 6 aa, synthetic construct
PVECKF

SEQ ID NO: 39298 - protein, 6 aa, synthetic construct
PVECKW

SEQ ID NO: 39299 - protein, 6 aa, synthetic construct
PVECKY

SEQ ID NO: 39300 - protein, 6 aa, synthetic construct
PVECMD

SEQ ID NO: 39301 - protein, 6 aa, synthetic construct
PVECME

SEQ ID NO: 39302 - protein, 6 aa, synthetic construct
PVECMF

SEQ ID NO: 39303 - protein, 6 aa, synthetic construct
PVECMW

SEQ ID NO: 39304 - protein, 6 aa, synthetic construct
PVECMY

SEQ ID NO: 39305 - protein, 6 aa, synthetic construct
PVECFD

SEQ ID NO: 39306 - protein, 6 aa, synthetic construct
PVECFE

SEQ ID NO: 39307 - protein, 6 aa, synthetic construct
PVECFF

SEQ ID NO: 39308 - protein, 6 aa, synthetic construct
PVECFW

SEQ ID NO: 39309 - protein, 6 aa, synthetic construct
PVECFY

SEQ ID NO: 39310 - protein, 6 aa, synthetic construct
PVECPD

SEQ ID NO: 39311 - protein, 6 aa, synthetic construct
PVECPE

SEQ ID NO: 39312 - protein, 6 aa, synthetic construct
PVECPF

SEQ ID NO: 39313 - protein, 6 aa, synthetic construct
PVECPW

SEQ ID NO: 39314 - protein, 6 aa, synthetic construct
PVECPY

SEQ ID NO: 39315 - protein, 6 aa, synthetic construct
PVECSD

SEQ ID NO: 39316 - protein, 6 aa, synthetic construct
PVECSE

SEQ ID NO: 39317 - protein, 6 aa, synthetic construct
PVECSF

SEQ ID NO: 39318 - protein, 6 aa, synthetic construct
PVECSW

SEQ ID NO: 39319 - protein, 6 aa, synthetic construct
PVECSY

SEQ ID NO: 39320 - protein, 6 aa, synthetic construct
PVECTD

SEQ ID NO: 39321 - protein, 6 aa, synthetic construct
PVECTE

SEQ ID NO: 39322 - protein, 6 aa, synthetic construct
PVECTF

SEQ ID NO: 39323 - protein, 6 aa, synthetic construct
PVECTW

SEQ ID NO: 39324 - protein, 6 aa, synthetic construct
PVECTY

SEQ ID NO: 39325 - protein, 6 aa, synthetic construct
PVECWD

SEQ ID NO: 39326 - protein, 6 aa, synthetic construct
PVECWE

SEQ ID NO: 39327 - protein, 6 aa, synthetic construct
PVECWF

SEQ ID NO: 39328 - protein, 6 aa, synthetic construct
PVECWW

SEQ ID NO: 39329 - protein, 6 aa, synthetic construct
PVECWY

SEQ ID NO: 39330 - protein, 6 aa, synthetic construct
PVECYD

SEQ ID NO: 39331 - protein, 6 aa, synthetic construct
PVECYE

SEQ ID NO: 39332 - protein, 6 aa, synthetic construct
PVECYF

SEQ ID NO: 39333 - protein, 6 aa, synthetic construct
PVECYW

SEQ ID NO: 39334 - protein, 6 aa, synthetic construct
PVECYY

SEQ ID NO: 39335 - protein, 6 aa, synthetic construct
PVECVD

SEQ ID NO: 39336 - protein, 6 aa, synthetic construct
PVECVE

SEQ ID NO: 39337 - protein, 6 aa, synthetic construct
PVECVF

SEQ ID NO: 39338 - protein, 6 aa, synthetic construct
PVECVW

SEQ ID NO: 39339 - protein, 6 aa, synthetic construct
PVECVY

SEQ ID NO: 39340 - protein, 6 aa, synthetic construct
PVEQAD

SEQ ID NO: 39341 - protein, 6 aa, synthetic construct
PVEQAE

SEQ ID NO: 39342 - protein, 6 aa, synthetic construct
PVEQAF

SEQ ID NO: 39343 - protein, 6 aa, synthetic construct
PVEQAW

SEQ ID NO: 39344 - protein, 6 aa, synthetic construct
PVEQAY

SEQ ID NO: 39345 - protein, 6 aa, synthetic construct
PVEQRD

SEQ ID NO: 39346 - protein, 6 aa, synthetic construct
PVEQRE

SEQ ID NO: 39347 - protein, 6 aa, synthetic construct
PVEQRF

SEQ ID NO: 39348 - protein, 6 aa, synthetic construct
PVEQRW

SEQ ID NO: 39349 - protein, 6 aa, synthetic construct
PVEQRY

SEQ ID NO: 39350 - protein, 6 aa, synthetic construct
PVEQND

SEQ ID NO: 39351 - protein, 6 aa, synthetic construct
PVEQNE

SEQ ID NO: 39352 - protein, 6 aa, synthetic construct
PVEQNF

SEQ ID NO: 39353 - protein, 6 aa, synthetic construct
PVEQNW

SEQ ID NO: 39354 - protein, 6 aa, synthetic construct
PVEQNY

SEQ ID NO: 39355 - protein, 6 aa, synthetic construct
PVEQDD

SEQ ID NO: 39356 - protein, 6 aa, synthetic construct
PVEQDE

SEQ ID NO: 39357 - protein, 6 aa, synthetic construct
PVEQDF

SEQ ID NO: 39358 - protein, 6 aa, synthetic construct
PVEQDW

SEQ ID NO: 39359 - protein, 6 aa, synthetic construct
PVEQDY

SEQ ID NO: 39360 - protein, 6 aa, synthetic construct
PVEQCD

SEQ ID NO: 39361 - protein, 6 aa, synthetic construct
PVEQCE

SEQ ID NO: 39362 - protein, 6 aa, synthetic construct
PVEQCF

SEQ ID NO: 39363 - protein, 6 aa, synthetic construct
PVEQCW

SEQ ID NO: 39364 - protein, 6 aa, synthetic construct
PVEQCY

SEQ ID NO: 39365 - protein, 6 aa, synthetic construct
PVEQQD

SEQ ID NO: 39366 - protein, 6 aa, synthetic construct
PVEQQE

SEQ ID NO: 39367 - protein, 6 aa, synthetic construct
PVEQQF

SEQ ID NO: 39368 - protein, 6 aa, synthetic construct
PVEQQW

SEQ ID NO: 39369 - protein, 6 aa, synthetic construct
PVEQQY

SEQ ID NO: 39370 - protein, 6 aa, synthetic construct
PVEQED

SEQ ID NO: 39371 - protein, 6 aa, synthetic construct
PVEQEE

SEQ ID NO: 39372 - protein, 6 aa, synthetic construct
PVEQEF

SEQ ID NO: 39373 - protein, 6 aa, synthetic construct
PVEQEW

SEQ ID NO: 39374 - protein, 6 aa, synthetic construct
PVEQEY

SEQ ID NO: 39375 - protein, 6 aa, synthetic construct
PVEQGD

SEQ ID NO: 39376 - protein, 6 aa, synthetic construct
PVEQGE

SEQ ID NO: 39377 - protein, 6 aa, synthetic construct
PVEQGF

SEQ ID NO: 39378 - protein, 6 aa, synthetic construct
PVEQGW

SEQ ID NO: 39379 - protein, 6 aa, synthetic construct
PVEQGY

SEQ ID NO: 39380 - protein, 6 aa, synthetic construct
PVEQHD

SEQ ID NO: 39381 - protein, 6 aa, synthetic construct
PVEQHE

SEQ ID NO: 39382 - protein, 6 aa, synthetic construct
PVEQHF

SEQ ID NO: 39383 - protein, 6 aa, synthetic construct
PVEQHW

SEQ ID NO: 39384 - protein, 6 aa, synthetic construct
PVEQHY

SEQ ID NO: 39385 - protein, 6 aa, synthetic construct
PVEQID

SEQ ID NO: 39386 - protein, 6 aa, synthetic construct
PVEQIE

SEQ ID NO: 39387 - protein, 6 aa, synthetic construct
PVEQIF

SEQ ID NO: 39388 - protein, 6 aa, synthetic construct
PVEQIW

SEQ ID NO: 39389 - protein, 6 aa, synthetic construct
PVEQIY

SEQ ID NO: 39390 - protein, 6 aa, synthetic construct
PVEQLD

SEQ ID NO: 39391 - protein, 6 aa, synthetic construct
PVEQLE

SEQ ID NO: 39392 - protein, 6 aa, synthetic construct
PVEQLF

SEQ ID NO: 39393 - protein, 6 aa, synthetic construct
PVEQLW

SEQ ID NO: 39394 - protein, 6 aa, synthetic construct
PVEQLY

SEQ ID NO: 39395 - protein, 6 aa, synthetic construct
PVEQKD

SEQ ID NO: 39396 - protein, 6 aa, synthetic construct
PVEQKE

SEQ ID NO: 39397 - protein, 6 aa, synthetic construct
PVEQKF

SEQ ID NO: 39398 - protein, 6 aa, synthetic construct
PVEQKW

SEQ ID NO: 39399 - protein, 6 aa, synthetic construct
PVEQKY

SEQ ID NO: 39400 - protein, 6 aa, synthetic construct
PVEQMD

SEQ ID NO: 39401 - protein, 6 aa, synthetic construct
PVEQME

SEQ ID NO: 39402 - protein, 6 aa, synthetic construct
PVEQMF

SEQ ID NO: 39403 - protein, 6 aa, synthetic construct
PVEQMW

SEQ ID NO: 39404 - protein, 6 aa, synthetic construct
PVEQMY

SEQ ID NO: 39405 - protein, 6 aa, synthetic construct
PVEQFD

SEQ ID NO: 39406 - protein, 6 aa, synthetic construct
PVEQFE

SEQ ID NO: 39407 - protein, 6 aa, synthetic construct
PVEQFF

SEQ ID NO: 39408 - protein, 6 aa, synthetic construct
PVEQFW

SEQ ID NO: 39409 - protein, 6 aa, synthetic construct
PVEQFY

SEQ ID NO: 39410 - protein, 6 aa, synthetic construct
PVEQPD

SEQ ID NO: 39411 - protein, 6 aa, synthetic construct
PVEQPE

SEQ ID NO: 39412 - protein, 6 aa, synthetic construct
PVEQPF

SEQ ID NO: 39413 - protein, 6 aa, synthetic construct
PVEQPW

SEQ ID NO: 39414 - protein, 6 aa, synthetic construct
PVEQPY

SEQ ID NO: 39415 - protein, 6 aa, synthetic construct
PVEQSD

SEQ ID NO: 39416 - protein, 6 aa, synthetic construct
PVEQSE

SEQ ID NO: 39417 - protein, 6 aa, synthetic construct
PVEQSF

SEQ ID NO: 39418 - protein, 6 aa, synthetic construct
PVEQSW

SEQ ID NO: 39419 - protein, 6 aa, synthetic construct
PVEQSY

SEQ ID NO: 39420 - protein, 6 aa, synthetic construct
PVEQTD

SEQ ID NO: 39421 - protein, 6 aa, synthetic construct
PVEQTE

SEQ ID NO: 39422 - protein, 6 aa, synthetic construct
PVEQTF

SEQ ID NO: 39423 - protein, 6 aa, synthetic construct
PVEQTW

SEQ ID NO: 39424 - protein, 6 aa, synthetic construct
PVEQTY

SEQ ID NO: 39425 - protein, 6 aa, synthetic construct
PVEQWD

SEQ ID NO: 39426 - protein, 6 aa, synthetic construct
PVEQWE

SEQ ID NO: 39427 - protein, 6 aa, synthetic construct
PVEQWF

SEQ ID NO: 39428 - protein, 6 aa, synthetic construct
PVEQWW

SEQ ID NO: 39429 - protein, 6 aa, synthetic construct
PVEQWY

SEQ ID NO: 39430 - protein, 6 aa, synthetic construct
PVEQYD

SEQ ID NO: 39431 - protein, 6 aa, synthetic construct
PVEQYE

SEQ ID NO: 39432 - protein, 6 aa, synthetic construct
PVEQYF

SEQ ID NO: 39433 - protein, 6 aa, synthetic construct
PVEQYW

SEQ ID NO: 39434 - protein, 6 aa, synthetic construct
PVEQYY

SEQ ID NO: 39435 - protein, 6 aa, synthetic construct
PVEQVD

SEQ ID NO: 39436 - protein, 6 aa, synthetic construct
PVEQVE

SEQ ID NO: 39437 - protein, 6 aa, synthetic construct
PVEQVF

SEQ ID NO: 39438 - protein, 6 aa, synthetic construct
PVEQVW

SEQ ID NO: 39439 - protein, 6 aa, synthetic construct
PVEQVY

SEQ ID NO: 39440 - protein, 6 aa, synthetic construct
PVEEAD

SEQ ID NO: 39441 - protein, 6 aa, synthetic construct
PVEEAE

SEQ ID NO: 39442 - protein, 6 aa, synthetic construct
PVEEAF

SEQ ID NO: 39443 - protein, 6 aa, synthetic construct
PVEEAW

SEQ ID NO: 39444 - protein, 6 aa, synthetic construct
PVEEAY

SEQ ID NO: 39445 - protein, 6 aa, synthetic construct
PVEERD

SEQ ID NO: 39446 - protein, 6 aa, synthetic construct
PVEERE

SEQ ID NO: 39447 - protein, 6 aa, synthetic construct
PVEERF

SEQ ID NO: 39448 - protein, 6 aa, synthetic construct
PVEERW

SEQ ID NO: 39449 - protein, 6 aa, synthetic construct
PVEERY

SEQ ID NO: 39450 - protein, 6 aa, synthetic construct
PVEEND

SEQ ID NO: 39451 - protein, 6 aa, synthetic construct
PVEENE

SEQ ID NO: 39452 - protein, 6 aa, synthetic construct
PVEENF

SEQ ID NO: 39453 - protein, 6 aa, synthetic construct
PVEENW

SEQ ID NO: 39454 - protein, 6 aa, synthetic construct
PVEENY

SEQ ID NO: 39455 - protein, 6 aa, synthetic construct
PVEEDD

SEQ ID NO: 39456 - protein, 6 aa, synthetic construct
PVEEDE

SEQ ID NO: 39457 - protein, 6 aa, synthetic construct
PVEEDF

SEQ ID NO: 39458 - protein, 6 aa, synthetic construct
PVEEDW

SEQ ID NO: 39459 - protein, 6 aa, synthetic construct
PVEEDY

SEQ ID NO: 39460 - protein, 6 aa, synthetic construct
PVEECD

SEQ ID NO: 39461 - protein, 6 aa, synthetic construct
PVEECE

SEQ ID NO: 39462 - protein, 6 aa, synthetic construct
PVEECF

SEQ ID NO: 39463 - protein, 6 aa, synthetic construct
PVEECW

SEQ ID NO: 39464 - protein, 6 aa, synthetic construct
PVEECY

SEQ ID NO: 39465 - protein, 6 aa, synthetic construct
PVEEQD

SEQ ID NO: 39466 - protein, 6 aa, synthetic construct
PVEEQE

SEQ ID NO: 39467 - protein, 6 aa, synthetic construct
PVEEQF

SEQ ID NO: 39468 - protein, 6 aa, synthetic construct
PVEEQW

SEQ ID NO: 39469 - protein, 6 aa, synthetic construct
PVEEQY

SEQ ID NO: 39470 - protein, 6 aa, synthetic construct
PVEEED

SEQ ID NO: 39471 - protein, 6 aa, synthetic construct
PVEEEE

SEQ ID NO: 39472 - protein, 6 aa, synthetic construct
PVEEEF

SEQ ID NO: 39473 - protein, 6 aa, synthetic construct
PVEEEW

SEQ ID NO: 39474 - protein, 6 aa, synthetic construct
PVEEEY

SEQ ID NO: 39475 - protein, 6 aa, synthetic construct
PVEEGD

SEQ ID NO: 39476 - protein, 6 aa, synthetic construct
PVEEGE

SEQ ID NO: 39477 - protein, 6 aa, synthetic construct
PVEEGF

SEQ ID NO: 39478 - protein, 6 aa, synthetic construct
PVEEGW

SEQ ID NO: 39479 - protein, 6 aa, synthetic construct
PVEEGY

SEQ ID NO: 39480 - protein, 6 aa, synthetic construct
PVEEHD

SEQ ID NO: 39481 - protein, 6 aa, synthetic construct
PVEEHE

SEQ ID NO: 39482 - protein, 6 aa, synthetic construct
PVEEHF

SEQ ID NO: 39483 - protein, 6 aa, synthetic construct
PVEEHW

SEQ ID NO: 39484 - protein, 6 aa, synthetic construct
PVEEHY

SEQ ID NO: 39485 - protein, 6 aa, synthetic construct
PVEEID

SEQ ID NO: 39486 - protein, 6 aa, synthetic construct
PVEEIE

SEQ ID NO: 39487 - protein, 6 aa, synthetic construct
PVEEIF

SEQ ID NO: 39488 - protein, 6 aa, synthetic construct
PVEEIW

SEQ ID NO: 39489 - protein, 6 aa, synthetic construct
PVEEIY

SEQ ID NO: 39490 - protein, 6 aa, synthetic construct
PVEELD

SEQ ID NO: 39491 - protein, 6 aa, synthetic construct
PVEELE

SEQ ID NO: 39492 - protein, 6 aa, synthetic construct
PVEELF

SEQ ID NO: 39493 - protein, 6 aa, synthetic construct
PVEELW

SEQ ID NO: 39494 - protein, 6 aa, synthetic construct
PVEELY

SEQ ID NO: 39495 - protein, 6 aa, synthetic construct
PVEEKD

SEQ ID NO: 39496 - protein, 6 aa, synthetic construct
PVEEKE

SEQ ID NO: 39497 - protein, 6 aa, synthetic construct
PVEEKF

SEQ ID NO: 39498 - protein, 6 aa, synthetic construct
PVEEKW

SEQ ID NO: 39499 - protein, 6 aa, synthetic construct
PVEEKY

SEQ ID NO: 39500 - protein, 6 aa, synthetic construct
PVEEMD

SEQ ID NO: 39501 - protein, 6 aa, synthetic construct
PVEEME

SEQ ID NO: 39502 - protein, 6 aa, synthetic construct
PVEEMF

SEQ ID NO: 39503 - protein, 6 aa, synthetic construct
PVEEMW

SEQ ID NO: 39504 - protein, 6 aa, synthetic construct
PVEEMY

SEQ ID NO: 39505 - protein, 6 aa, synthetic construct
PVEEFD

SEQ ID NO: 39506 - protein, 6 aa, synthetic construct
PVEEFE

SEQ ID NO: 39507 - protein, 6 aa, synthetic construct
PVEEFF

SEQ ID NO: 39508 - protein, 6 aa, synthetic construct
PVEEFW

SEQ ID NO: 39509 - protein, 6 aa, synthetic construct
PVEEFY

SEQ ID NO: 39510 - protein, 6 aa, synthetic construct
PVEEPD

SEQ ID NO: 39511 - protein, 6 aa, synthetic construct
PVEEPE

SEQ ID NO: 39512 - protein, 6 aa, synthetic construct
PVEEPF

SEQ ID NO: 39513 - protein, 6 aa, synthetic construct
PVEEPW

SEQ ID NO: 39514 - protein, 6 aa, synthetic construct
PVEEPY

SEQ ID NO: 39515 - protein, 6 aa, synthetic construct
PVEESD

SEQ ID NO: 39516 - protein, 6 aa, synthetic construct
PVEESE

SEQ ID NO: 39517 - protein, 6 aa, synthetic construct
PVEESF

SEQ ID NO: 39518 - protein, 6 aa, synthetic construct
PVEESW

SEQ ID NO: 39519 - protein, 6 aa, synthetic construct
PVEESY

SEQ ID NO: 39520 - protein, 6 aa, synthetic construct
PVEETD

SEQ ID NO: 39521 - protein, 6 aa, synthetic construct
PVEETE

SEQ ID NO: 39522 - protein, 6 aa, synthetic construct
PVEETF

SEQ ID NO: 39523 - protein, 6 aa, synthetic construct
PVEETW

SEQ ID NO: 39524 - protein, 6 aa, synthetic construct
PVEETY

SEQ ID NO: 39525 - protein, 6 aa, synthetic construct
PVEEWD

SEQ ID NO: 39526 - protein, 6 aa, synthetic construct
PVEEWE

SEQ ID NO: 39527 - protein, 6 aa, synthetic construct
PVEEWF

SEQ ID NO: 39528 - protein, 6 aa, synthetic construct
PVEEWW

SEQ ID NO: 39529 - protein, 6 aa, synthetic construct
PVEEWY

SEQ ID NO: 39530 - protein, 6 aa, synthetic construct
PVEEYD

SEQ ID NO: 39531 - protein, 6 aa, synthetic construct
PVEEYE

SEQ ID NO: 39532 - protein, 6 aa, synthetic construct
PVEEYF

SEQ ID NO: 39533 - protein, 6 aa, synthetic construct
PVEEYW

SEQ ID NO: 39534 - protein, 6 aa, synthetic construct
PVEEYY

SEQ ID NO: 39535 - protein, 6 aa, synthetic construct
PVEEVD

SEQ ID NO: 39536 - protein, 6 aa, synthetic construct
PVEEVE

SEQ ID NO: 39537 - protein, 6 aa, synthetic construct
PVEEVF

SEQ ID NO: 39538 - protein, 6 aa, synthetic construct
PVEEVW

SEQ ID NO: 39539 - protein, 6 aa, synthetic construct
PVEEVY

SEQ ID NO: 39540 - protein, 6 aa, synthetic construct
PVEGAD

SEQ ID NO: 39541 - protein, 6 aa, synthetic construct
PVEGAE

SEQ ID NO: 39542 - protein, 6 aa, synthetic construct
PVEGAF

SEQ ID NO: 39543 - protein, 6 aa, synthetic construct
PVEGAW

SEQ ID NO: 39544 - protein, 6 aa, synthetic construct
PVEGAY

SEQ ID NO: 39545 - protein, 6 aa, synthetic construct
PVEGRD

SEQ ID NO: 39546 - protein, 6 aa, synthetic construct
PVEGRE

SEQ ID NO: 39547 - protein, 6 aa, synthetic construct
PVEGRF

SEQ ID NO: 39548 - protein, 6 aa, synthetic construct
PVEGRW

SEQ ID NO: 39549 - protein, 6 aa, synthetic construct
PVEGRY

SEQ ID NO: 39550 - protein, 6 aa, synthetic construct
PVEGND

SEQ ID NO: 39551 - protein, 6 aa, synthetic construct
PVEGNE

SEQ ID NO: 39552 - protein, 6 aa, synthetic construct
PVEGNF

SEQ ID NO: 39553 - protein, 6 aa, synthetic construct
PVEGNW

SEQ ID NO: 39554 - protein, 6 aa, synthetic construct
PVEGNY

SEQ ID NO: 39555 - protein, 6 aa, synthetic construct
PVEGDD

SEQ ID NO: 39556 - protein, 6 aa, synthetic construct
PVEGDE

SEQ ID NO: 39557 - protein, 6 aa, synthetic construct
PVEGDF

SEQ ID NO: 39558 - protein, 6 aa, synthetic construct
PVEGDW

SEQ ID NO: 39559 - protein, 6 aa, synthetic construct
PVEGDY

SEQ ID NO: 39560 - protein, 6 aa, synthetic construct
PVEGCD

SEQ ID NO: 39561 - protein, 6 aa, synthetic construct
PVEGCE

SEQ ID NO: 39562 - protein, 6 aa, synthetic construct
PVEGCF

SEQ ID NO: 39563 - protein, 6 aa, synthetic construct
PVEGCW

SEQ ID NO: 39564 - protein, 6 aa, synthetic construct
PVEGCY

SEQ ID NO: 39565 - protein, 6 aa, synthetic construct
PVEGQD

SEQ ID NO: 39566 - protein, 6 aa, synthetic construct
PVEGQE

SEQ ID NO: 39567 - protein, 6 aa, synthetic construct
PVEGQF

SEQ ID NO: 39568 - protein, 6 aa, synthetic construct
PVEGQW

SEQ ID NO: 39569 - protein, 6 aa, synthetic construct
PVEGQY

SEQ ID NO: 39570 - protein, 6 aa, synthetic construct
PVEGED

SEQ ID NO: 39571 - protein, 6 aa, synthetic construct
PVEGEE

SEQ ID NO: 39572 - protein, 6 aa, synthetic construct
PVEGEF

SEQ ID NO: 39573 - protein, 6 aa, synthetic construct
PVEGEW

SEQ ID NO: 39574 - protein, 6 aa, synthetic construct
PVEGEY

SEQ ID NO: 39575 - protein, 6 aa, synthetic construct
PVEGGD

SEQ ID NO: 39576 - protein, 6 aa, synthetic construct
PVEGGE

SEQ ID NO: 39577 - protein, 6 aa, synthetic construct
PVEGGF

SEQ ID NO: 39578 - protein, 6 aa, synthetic construct
PVEGGW

SEQ ID NO: 39579 - protein, 6 aa, synthetic construct
PVEGGY

SEQ ID NO: 39580 - protein, 6 aa, synthetic construct
PVEGHD

SEQ ID NO: 39581 - protein, 6 aa, synthetic construct
PVEGHE

SEQ ID NO: 39582 - protein, 6 aa, synthetic construct
PVEGHF

SEQ ID NO: 39583 - protein, 6 aa, synthetic construct
PVEGHW

SEQ ID NO: 39584 - protein, 6 aa, synthetic construct
PVEGHY

SEQ ID NO: 39585 - protein, 6 aa, synthetic construct
PVEGID

SEQ ID NO: 39586 - protein, 6 aa, synthetic construct
PVEGIE

SEQ ID NO: 39587 - protein, 6 aa, synthetic construct
PVEGIF

SEQ ID NO: 39588 - protein, 6 aa, synthetic construct
PVEGIW

SEQ ID NO: 39589 - protein, 6 aa, synthetic construct
PVEGIY

SEQ ID NO: 39590 - protein, 6 aa, synthetic construct
PVEGLD

SEQ ID NO: 39591 - protein, 6 aa, synthetic construct
PVEGLE

SEQ ID NO: 39592 - protein, 6 aa, synthetic construct
PVEGLF

SEQ ID NO: 39593 - protein, 6 aa, synthetic construct
PVEGLW

SEQ ID NO: 39594 - protein, 6 aa, synthetic construct
PVEGLY

SEQ ID NO: 39595 - protein, 6 aa, synthetic construct
PVEGKD

SEQ ID NO: 39596 - protein, 6 aa, synthetic construct
PVEGKE

SEQ ID NO: 39597 - protein, 6 aa, synthetic construct
PVEGKF

SEQ ID NO: 39598 - protein, 6 aa, synthetic construct
PVEGKW

SEQ ID NO: 39599 - protein, 6 aa, synthetic construct
PVEGKY

SEQ ID NO: 39600 - protein, 6 aa, synthetic construct
PVEGMD

SEQ ID NO: 39601 - protein, 6 aa, synthetic construct
PVEGME

SEQ ID NO: 39602 - protein, 6 aa, synthetic construct
PVEGMF

SEQ ID NO: 39603 - protein, 6 aa, synthetic construct
PVEGMW

SEQ ID NO: 39604 - protein, 6 aa, synthetic construct
PVEGMY

SEQ ID NO: 39605 - protein, 6 aa, synthetic construct
PVEGFD

SEQ ID NO: 39606 - protein, 6 aa, synthetic construct
PVEGFE

SEQ ID NO: 39607 - protein, 6 aa, synthetic construct
PVEGFF

SEQ ID NO: 39608 - protein, 6 aa, synthetic construct
PVEGFW

SEQ ID NO: 39609 - protein, 6 aa, synthetic construct
PVEGFY

SEQ ID NO: 39610 - protein, 6 aa, synthetic construct
PVEGPD

SEQ ID NO: 39611 - protein, 6 aa, synthetic construct
PVEGPE

SEQ ID NO: 39612 - protein, 6 aa, synthetic construct
PVEGPF

SEQ ID NO: 39613 - protein, 6 aa, synthetic construct
PVEGPW

SEQ ID NO: 39614 - protein, 6 aa, synthetic construct
PVEGPY

SEQ ID NO: 39615 - protein, 6 aa, synthetic construct
PVEGSD

SEQ ID NO: 39616 - protein, 6 aa, synthetic construct
PVEGSE

SEQ ID NO: 39617 - protein, 6 aa, synthetic construct
PVEGSF

SEQ ID NO: 39618 - protein, 6 aa, synthetic construct
PVEGSW

SEQ ID NO: 39619 - protein, 6 aa, synthetic construct
PVEGSY

SEQ ID NO: 39620 - protein, 6 aa, synthetic construct
PVEGTD

SEQ ID NO: 39621 - protein, 6 aa, synthetic construct
PVEGTE

SEQ ID NO: 39622 - protein, 6 aa, synthetic construct
PVEGTF

SEQ ID NO: 39623 - protein, 6 aa, synthetic construct
PVEGTW

SEQ ID NO: 39624 - protein, 6 aa, synthetic construct
PVEGTY

SEQ ID NO: 39625 - protein, 6 aa, synthetic construct
PVEGWD

SEQ ID NO: 39626 - protein, 6 aa, synthetic construct
PVEGWE

SEQ ID NO: 39627 - protein, 6 aa, synthetic construct
PVEGWF

SEQ ID NO: 39628 - protein, 6 aa, synthetic construct
PVEGWW

SEQ ID NO: 39629 - protein, 6 aa, synthetic construct
PVEGWY

SEQ ID NO: 39630 - protein, 6 aa, synthetic construct
PVEGYD

SEQ ID NO: 39631 - protein, 6 aa, synthetic construct
PVEGYE

SEQ ID NO: 39632 - protein, 6 aa, synthetic construct
PVEGYF

SEQ ID NO: 39633 - protein, 6 aa, synthetic construct
PVEGYW

SEQ ID NO: 39634 - protein, 6 aa, synthetic construct
PVEGYY

SEQ ID NO: 39635 - protein, 6 aa, synthetic construct
PVEGVD

SEQ ID NO: 39636 - protein, 6 aa, synthetic construct
PVEGVE

SEQ ID NO: 39637 - protein, 6 aa, synthetic construct
PVEGVF

SEQ ID NO: 39638 - protein, 6 aa, synthetic construct
PVEGVW

SEQ ID NO: 39639 - protein, 6 aa, synthetic construct
PVEGVY

SEQ ID NO: 39640 - protein, 6 aa, synthetic construct
PVEHAD

SEQ ID NO: 39641 - protein, 6 aa, synthetic construct
PVEHAE

SEQ ID NO: 39642 - protein, 6 aa, synthetic construct
PVEHAF

SEQ ID NO: 39643 - protein, 6 aa, synthetic construct
PVEHAW

SEQ ID NO: 39644 - protein, 6 aa, synthetic construct
PVEHAY

SEQ ID NO: 39645 - protein, 6 aa, synthetic construct
PVEHRD

SEQ ID NO: 39646 - protein, 6 aa, synthetic construct
PVEHRE

SEQ ID NO: 39647 - protein, 6 aa, synthetic construct
PVEHRF

SEQ ID NO: 39648 - protein, 6 aa, synthetic construct
PVEHRW

SEQ ID NO: 39649 - protein, 6 aa, synthetic construct
PVEHRY

SEQ ID NO: 39650 - protein, 6 aa, synthetic construct
PVEHND

SEQ ID NO: 39651 - protein, 6 aa, synthetic construct
PVEHNE

SEQ ID NO: 39652 - protein, 6 aa, synthetic construct
PVEHNF

SEQ ID NO: 39653 - protein, 6 aa, synthetic construct
PVEHNW

SEQ ID NO: 39654 - protein, 6 aa, synthetic construct
PVEHNY

SEQ ID NO: 39655 - protein, 6 aa, synthetic construct
PVEHDD

SEQ ID NO: 39656 - protein, 6 aa, synthetic construct
PVEHDE

SEQ ID NO: 39657 - protein, 6 aa, synthetic construct
PVEHDF

SEQ ID NO: 39658 - protein, 6 aa, synthetic construct
PVEHDW

SEQ ID NO: 39659 - protein, 6 aa, synthetic construct
PVEHDY

SEQ ID NO: 39660 - protein, 6 aa, synthetic construct
PVEHCD

SEQ ID NO: 39661 - protein, 6 aa, synthetic construct
PVEHCE

SEQ ID NO: 39662 - protein, 6 aa, synthetic construct
PVEHCF

SEQ ID NO: 39663 - protein, 6 aa, synthetic construct
PVEHCW

SEQ ID NO: 39664 - protein, 6 aa, synthetic construct
PVEHCY

SEQ ID NO: 39665 - protein, 6 aa, synthetic construct
PVEHQD

SEQ ID NO: 39666 - protein, 6 aa, synthetic construct
PVEHQE

SEQ ID NO: 39667 - protein, 6 aa, synthetic construct
PVEHQF

SEQ ID NO: 39668 - protein, 6 aa, synthetic construct
PVEHQW

SEQ ID NO: 39669 - protein, 6 aa, synthetic construct
PVEHQY

SEQ ID NO: 39670 - protein, 6 aa, synthetic construct
PVEHED

SEQ ID NO: 39671 - protein, 6 aa, synthetic construct
PVEHEE

SEQ ID NO: 39672 - protein, 6 aa, synthetic construct
PVEHEF

SEQ ID NO: 39673 - protein, 6 aa, synthetic construct
PVEHEW

SEQ ID NO: 39674 - protein, 6 aa, synthetic construct
PVEHEY

SEQ ID NO: 39675 - protein, 6 aa, synthetic construct
PVEHGD

SEQ ID NO: 39676 - protein, 6 aa, synthetic construct
PVEHGE

SEQ ID NO: 39677 - protein, 6 aa, synthetic construct
PVEHGF

SEQ ID NO: 39678 - protein, 6 aa, synthetic construct
PVEHGW

SEQ ID NO: 39679 - protein, 6 aa, synthetic construct
PVEHGY

SEQ ID NO: 39680 - protein, 6 aa, synthetic construct
PVEHHD

SEQ ID NO: 39681 - protein, 6 aa, synthetic construct
PVEHHE

SEQ ID NO: 39682 - protein, 6 aa, synthetic construct
PVEHHF

SEQ ID NO: 39683 - protein, 6 aa, synthetic construct
PVEHHW

SEQ ID NO: 39684 - protein, 6 aa, synthetic construct
PVEHHY

SEQ ID NO: 39685 - protein, 6 aa, synthetic construct
PVEHID

SEQ ID NO: 39686 - protein, 6 aa, synthetic construct
PVEHIE

SEQ ID NO: 39687 - protein, 6 aa, synthetic construct
PVEHIF

SEQ ID NO: 39688 - protein, 6 aa, synthetic construct
PVEHIW

SEQ ID NO: 39689 - protein, 6 aa, synthetic construct
PVEHIY

SEQ ID NO: 39690 - protein, 6 aa, synthetic construct
PVEHLD

SEQ ID NO: 39691 - protein, 6 aa, synthetic construct
PVEHLE

SEQ ID NO: 39692 - protein, 6 aa, synthetic construct
PVEHLF

SEQ ID NO: 39693 - protein, 6 aa, synthetic construct
PVEHLW

SEQ ID NO: 39694 - protein, 6 aa, synthetic construct
PVEHLY

SEQ ID NO: 39695 - protein, 6 aa, synthetic construct
PVEHKD

SEQ ID NO: 39696 - protein, 6 aa, synthetic construct
PVEHKE

SEQ ID NO: 39697 - protein, 6 aa, synthetic construct
PVEHKF

SEQ ID NO: 39698 - protein, 6 aa, synthetic construct
PVEHKW

SEQ ID NO: 39699 - protein, 6 aa, synthetic construct
PVEHKY

SEQ ID NO: 39700 - protein, 6 aa, synthetic construct
PVEHMD

SEQ ID NO: 39701 - protein, 6 aa, synthetic construct
PVEHME

SEQ ID NO: 39702 - protein, 6 aa, synthetic construct
PVEHMF

SEQ ID NO: 39703 - protein, 6 aa, synthetic construct
PVEHMW

SEQ ID NO: 39704 - protein, 6 aa, synthetic construct
PVEHMY

SEQ ID NO: 39705 - protein, 6 aa, synthetic construct
PVEHFD

SEQ ID NO: 39706 - protein, 6 aa, synthetic construct
PVEHFE

SEQ ID NO: 39707 - protein, 6 aa, synthetic construct
PVEHFF

SEQ ID NO: 39708 - protein, 6 aa, synthetic construct
PVEHFW

SEQ ID NO: 39709 - protein, 6 aa, synthetic construct
PVEHFY

SEQ ID NO: 39710 - protein, 6 aa, synthetic construct
PVEHPD

SEQ ID NO: 39711 - protein, 6 aa, synthetic construct
PVEHPE

SEQ ID NO: 39712 - protein, 6 aa, synthetic construct
PVEHPF

SEQ ID NO: 39713 - protein, 6 aa, synthetic construct
PVEHPW

SEQ ID NO: 39714 - protein, 6 aa, synthetic construct
PVEHPY

SEQ ID NO: 39715 - protein, 6 aa, synthetic construct
PVEHSD

SEQ ID NO: 39716 - protein, 6 aa, synthetic construct
PVEHSE

SEQ ID NO: 39717 - protein, 6 aa, synthetic construct
PVEHSF

SEQ ID NO: 39718 - protein, 6 aa, synthetic construct
PVEHSW

SEQ ID NO: 39719 - protein, 6 aa, synthetic construct
PVEHSY

SEQ ID NO: 39720 - protein, 6 aa, synthetic construct
PVEHTD

SEQ ID NO: 39721 - protein, 6 aa, synthetic construct
PVEHTE

SEQ ID NO: 39722 - protein, 6 aa, synthetic construct
PVEHTF

SEQ ID NO: 39723 - protein, 6 aa, synthetic construct
PVEHTW

SEQ ID NO: 39724 - protein, 6 aa, synthetic construct
PVEHTY

SEQ ID NO: 39725 - protein, 6 aa, synthetic construct
PVEHWD

SEQ ID NO: 39726 - protein, 6 aa, synthetic construct
PVEHWE

SEQ ID NO: 39727 - protein, 6 aa, synthetic construct
PVEHWF

SEQ ID NO: 39728 - protein, 6 aa, synthetic construct
PVEHWW

SEQ ID NO: 39729 - protein, 6 aa, synthetic construct
PVEHWY

SEQ ID NO: 39730 - protein, 6 aa, synthetic construct
PVEHYD

SEQ ID NO: 39731 - protein, 6 aa, synthetic construct
PVEHYE

SEQ ID NO: 39732 - protein, 6 aa, synthetic construct
PVEHYF

SEQ ID NO: 39733 - protein, 6 aa, synthetic construct
PVEHYW

SEQ ID NO: 39734 - protein, 6 aa, synthetic construct
PVEHYY

SEQ ID NO: 39735 - protein, 6 aa, synthetic construct
PVEHVD

SEQ ID NO: 39736 - protein, 6 aa, synthetic construct
PVEHVE

SEQ ID NO: 39737 - protein, 6 aa, synthetic construct
PVEHVF

SEQ ID NO: 39738 - protein, 6 aa, synthetic construct
PVEHVW

SEQ ID NO: 39739 - protein, 6 aa, synthetic construct
PVEHVY

SEQ ID NO: 39740 - protein, 6 aa, synthetic construct
PVEIAD

SEQ ID NO: 39741 - protein, 6 aa, synthetic construct
PVEIAE

SEQ ID NO: 39742 - protein, 6 aa, synthetic construct
PVEIAF

SEQ ID NO: 39743 - protein, 6 aa, synthetic construct
PVEIAW

SEQ ID NO: 39744 - protein, 6 aa, synthetic construct
PVEIAY

SEQ ID NO: 39745 - protein, 6 aa, synthetic construct
PVEIRD

SEQ ID NO: 39746 - protein, 6 aa, synthetic construct
PVEIRE

SEQ ID NO: 39747 - protein, 6 aa, synthetic construct
PVEIRF

SEQ ID NO: 39748 - protein, 6 aa, synthetic construct
PVEIRW

SEQ ID NO: 39749 - protein, 6 aa, synthetic construct
PVEIRY

SEQ ID NO: 39750 - protein, 6 aa, synthetic construct
PVEIND

SEQ ID NO: 39751 - protein, 6 aa, synthetic construct
PVEINE

SEQ ID NO: 39752 - protein, 6 aa, synthetic construct
PVEINF

SEQ ID NO: 39753 - protein, 6 aa, synthetic construct
PVEINW

SEQ ID NO: 39754 - protein, 6 aa, synthetic construct
PVEINY

SEQ ID NO: 39755 - protein, 6 aa, synthetic construct
PVEIDD

SEQ ID NO: 39756 - protein, 6 aa, synthetic construct
PVEIDE

SEQ ID NO: 39757 - protein, 6 aa, synthetic construct
PVEIDF

SEQ ID NO: 39758 - protein, 6 aa, synthetic construct
PVEIDW

SEQ ID NO: 39759 - protein, 6 aa, synthetic construct
PVEIDY

SEQ ID NO: 39760 - protein, 6 aa, synthetic construct
PVEICD

SEQ ID NO: 39761 - protein, 6 aa, synthetic construct
PVEICE

SEQ ID NO: 39762 - protein, 6 aa, synthetic construct
PVEICF

SEQ ID NO: 39763 - protein, 6 aa, synthetic construct
PVEICW

SEQ ID NO: 39764 - protein, 6 aa, synthetic construct
PVEICY

SEQ ID NO: 39765 - protein, 6 aa, synthetic construct
PVEIQD

SEQ ID NO: 39766 - protein, 6 aa, synthetic construct
PVEIQE

SEQ ID NO: 39767 - protein, 6 aa, synthetic construct
PVEIQF

SEQ ID NO: 39768 - protein, 6 aa, synthetic construct
PVEIQW

SEQ ID NO: 39769 - protein, 6 aa, synthetic construct
PVEIQY

SEQ ID NO: 39770 - protein, 6 aa, synthetic construct
PVEIED

SEQ ID NO: 39771 - protein, 6 aa, synthetic construct
PVEIEE

SEQ ID NO: 39772 - protein, 6 aa, synthetic construct
PVEIEF

SEQ ID NO: 39773 - protein, 6 aa, synthetic construct
PVEIEW

SEQ ID NO: 39774 - protein, 6 aa, synthetic construct
PVEIEY

SEQ ID NO: 39775 - protein, 6 aa, synthetic construct
PVEIGD

SEQ ID NO: 39776 - protein, 6 aa, synthetic construct
PVEIGE

SEQ ID NO: 39777 - protein, 6 aa, synthetic construct
PVEIGF

SEQ ID NO: 39778 - protein, 6 aa, synthetic construct
PVEIGW

SEQ ID NO: 39779 - protein, 6 aa, synthetic construct
PVEIGY

SEQ ID NO: 39780 - protein, 6 aa, synthetic construct
PVEIHD

SEQ ID NO: 39781 - protein, 6 aa, synthetic construct
PVEIHE

SEQ ID NO: 39782 - protein, 6 aa, synthetic construct
PVEIHF

SEQ ID NO: 39783 - protein, 6 aa, synthetic construct
PVEIHW

SEQ ID NO: 39784 - protein, 6 aa, synthetic construct
PVEIHY

SEQ ID NO: 39785 - protein, 6 aa, synthetic construct
PVEIID

SEQ ID NO: 39786 - protein, 6 aa, synthetic construct
PVEIIE

SEQ ID NO: 39787 - protein, 6 aa, synthetic construct
PVEIIF

SEQ ID NO: 39788 - protein, 6 aa, synthetic construct
PVEIIW

SEQ ID NO: 39789 - protein, 6 aa, synthetic construct
PVEIIY

SEQ ID NO: 39790 - protein, 6 aa, synthetic construct
PVEILD

SEQ ID NO: 39791 - protein, 6 aa, synthetic construct
PVEILE

SEQ ID NO: 39792 - protein, 6 aa, synthetic construct
PVEILF

SEQ ID NO: 39793 - protein, 6 aa, synthetic construct
PVEILW

SEQ ID NO: 39794 - protein, 6 aa, synthetic construct
PVEILY

SEQ ID NO: 39795 - protein, 6 aa, synthetic construct
PVEIKD

SEQ ID NO: 39796 - protein, 6 aa, synthetic construct
PVEIKE

SEQ ID NO: 39797 - protein, 6 aa, synthetic construct
PVEIKF

SEQ ID NO: 39798 - protein, 6 aa, synthetic construct
PVEIKW

SEQ ID NO: 39799 - protein, 6 aa, synthetic construct
PVEIKY

SEQ ID NO: 39800 - protein, 6 aa, synthetic construct
PVEIMD

SEQ ID NO: 39801 - protein, 6 aa, synthetic construct
PVEIME

SEQ ID NO: 39802 - protein, 6 aa, synthetic construct
PVEIMF

SEQ ID NO: 39803 - protein, 6 aa, synthetic construct
PVEIMW

SEQ ID NO: 39804 - protein, 6 aa, synthetic construct
PVEIMY

SEQ ID NO: 39805 - protein, 6 aa, synthetic construct
PVEIFD

SEQ ID NO: 39806 - protein, 6 aa, synthetic construct
PVEIFE

SEQ ID NO: 39807 - protein, 6 aa, synthetic construct
PVEIFF

SEQ ID NO: 39808 - protein, 6 aa, synthetic construct
PVEIFW

SEQ ID NO: 39809 - protein, 6 aa, synthetic construct
PVEIFY

SEQ ID NO: 39810 - protein, 6 aa, synthetic construct
PVEIPD

SEQ ID NO: 39811 - protein, 6 aa, synthetic construct
PVEIPE

SEQ ID NO: 39812 - protein, 6 aa, synthetic construct
PVEIPF

SEQ ID NO: 39813 - protein, 6 aa, synthetic construct
PVEIPW

SEQ ID NO: 39814 - protein, 6 aa, synthetic construct
PVEIPY

SEQ ID NO: 39815 - protein, 6 aa, synthetic construct
PVEISD

SEQ ID NO: 39816 - protein, 6 aa, synthetic construct
PVEISE

SEQ ID NO: 39817 - protein, 6 aa, synthetic construct
PVEISF

SEQ ID NO: 39818 - protein, 6 aa, synthetic construct
PVEISW

SEQ ID NO: 39819 - protein, 6 aa, synthetic construct
PVEISY

SEQ ID NO: 39820 - protein, 6 aa, synthetic construct
PVEITD

SEQ ID NO: 39821 - protein, 6 aa, synthetic construct
PVEITE

SEQ ID NO: 39822 - protein, 6 aa, synthetic construct
PVEITF

SEQ ID NO: 39823 - protein, 6 aa, synthetic construct
PVEITW

SEQ ID NO: 39824 - protein, 6 aa, synthetic construct
PVEITY

SEQ ID NO: 39825 - protein, 6 aa, synthetic construct
PVEIWD

SEQ ID NO: 39826 - protein, 6 aa, synthetic construct
PVEIWE

SEQ ID NO: 39827 - protein, 6 aa, synthetic construct
PVEIWF

SEQ ID NO: 39828 - protein, 6 aa, synthetic construct
PVEIWW

SEQ ID NO: 39829 - protein, 6 aa, synthetic construct
PVEIWY

SEQ ID NO: 39830 - protein, 6 aa, synthetic construct
PVEIYD

SEQ ID NO: 39831 - protein, 6 aa, synthetic construct
PVEIYE

SEQ ID NO: 39832 - protein, 6 aa, synthetic construct
PVEIYF

SEQ ID NO: 39833 - protein, 6 aa, synthetic construct
PVEIYW

SEQ ID NO: 39834 - protein, 6 aa, synthetic construct
PVEIYY

SEQ ID NO: 39835 - protein, 6 aa, synthetic construct
PVEIVD

SEQ ID NO: 39836 - protein, 6 aa, synthetic construct
PVEIVE

SEQ ID NO: 39837 - protein, 6 aa, synthetic construct
PVEIVF

SEQ ID NO: 39838 - protein, 6 aa, synthetic construct
PVEIVW

SEQ ID NO: 39839 - protein, 6 aa, synthetic construct
PVEIVY

SEQ ID NO: 39840 - protein, 6 aa, synthetic construct
PVELAD

SEQ ID NO: 39841 - protein, 6 aa, synthetic construct
PVELAE

SEQ ID NO: 39842 - protein, 6 aa, synthetic construct
PVELAF

SEQ ID NO: 39843 - protein, 6 aa, synthetic construct
PVELAW

SEQ ID NO: 39844 - protein, 6 aa, synthetic construct
PVELAY

SEQ ID NO: 39845 - protein, 6 aa, synthetic construct
PVELRD

SEQ ID NO: 39846 - protein, 6 aa, synthetic construct
PVELRE

SEQ ID NO: 39847 - protein, 6 aa, synthetic construct
PVELRF

SEQ ID NO: 39848 - protein, 6 aa, synthetic construct
PVELRW

SEQ ID NO: 39849 - protein, 6 aa, synthetic construct
PVELRY

SEQ ID NO: 39850 - protein, 6 aa, synthetic construct
PVELND

SEQ ID NO: 39851 - protein, 6 aa, synthetic construct
PVELNE

SEQ ID NO: 39852 - protein, 6 aa, synthetic construct
PVELNF

SEQ ID NO: 39853 - protein, 6 aa, synthetic construct
PVELNW

SEQ ID NO: 39854 - protein, 6 aa, synthetic construct
PVELNY

SEQ ID NO: 39855 - protein, 6 aa, synthetic construct
PVELDD

SEQ ID NO: 39856 - protein, 6 aa, synthetic construct
PVELDE

SEQ ID NO: 39857 - protein, 6 aa, synthetic construct
PVELDF

SEQ ID NO: 39858 - protein, 6 aa, synthetic construct
PVELDW

SEQ ID NO: 39859 - protein, 6 aa, synthetic construct
PVELDY

SEQ ID NO: 39860 - protein, 6 aa, synthetic construct
PVELCD

SEQ ID NO: 39861 - protein, 6 aa, synthetic construct
PVELCE

SEQ ID NO: 39862 - protein, 6 aa, synthetic construct
PVELCF

SEQ ID NO: 39863 - protein, 6 aa, synthetic construct
PVELCW

SEQ ID NO: 39864 - protein, 6 aa, synthetic construct
PVELCY

SEQ ID NO: 39865 - protein, 6 aa, synthetic construct
PVELQD

SEQ ID NO: 39866 - protein, 6 aa, synthetic construct
PVELQE

SEQ ID NO: 39867 - protein, 6 aa, synthetic construct
PVELQF

SEQ ID NO: 39868 - protein, 6 aa, synthetic construct
PVELQW

SEQ ID NO: 39869 - protein, 6 aa, synthetic construct
PVELQY

SEQ ID NO: 39870 - protein, 6 aa, synthetic construct
PVELED

SEQ ID NO: 39871 - protein, 6 aa, synthetic construct
PVELEE

SEQ ID NO: 39872 - protein, 6 aa, synthetic construct
PVELEF

SEQ ID NO: 39873 - protein, 6 aa, synthetic construct
PVELEW

SEQ ID NO: 39874 - protein, 6 aa, synthetic construct
PVELEY

SEQ ID NO: 39875 - protein, 6 aa, synthetic construct
PVELGD

SEQ ID NO: 39876 - protein, 6 aa, synthetic construct
PVELGE

SEQ ID NO: 39877 - protein, 6 aa, synthetic construct
PVELGF

SEQ ID NO: 39878 - protein, 6 aa, synthetic construct
PVELGW

SEQ ID NO: 39879 - protein, 6 aa, synthetic construct
PVELGY

SEQ ID NO: 39880 - protein, 6 aa, synthetic construct
PVELHD

SEQ ID NO: 39881 - protein, 6 aa, synthetic construct
PVELHE

SEQ ID NO: 39882 - protein, 6 aa, synthetic construct
PVELHF

SEQ ID NO: 39883 - protein, 6 aa, synthetic construct
PVELHW

SEQ ID NO: 39884 - protein, 6 aa, synthetic construct
PVELHY

SEQ ID NO: 39885 - protein, 6 aa, synthetic construct
PVELID

SEQ ID NO: 39886 - protein, 6 aa, synthetic construct
PVELIE

SEQ ID NO: 39887 - protein, 6 aa, synthetic construct
PVELIF

SEQ ID NO: 39888 - protein, 6 aa, synthetic construct
PVELIW

SEQ ID NO: 39889 - protein, 6 aa, synthetic construct
PVELIY

SEQ ID NO: 39890 - protein, 6 aa, synthetic construct
PVELLD

SEQ ID NO: 39891 - protein, 6 aa, synthetic construct
PVELLE

SEQ ID NO: 39892 - protein, 6 aa, synthetic construct
PVELLF

SEQ ID NO: 39893 - protein, 6 aa, synthetic construct
PVELLW

SEQ ID NO: 39894 - protein, 6 aa, synthetic construct
PVELLY

SEQ ID NO: 39895 - protein, 6 aa, synthetic construct
PVELKD

SEQ ID NO: 39896 - protein, 6 aa, synthetic construct
PVELKE

SEQ ID NO: 39897 - protein, 6 aa, synthetic construct
PVELKF

SEQ ID NO: 39898 - protein, 6 aa, synthetic construct
PVELKW

SEQ ID NO: 39899 - protein, 6 aa, synthetic construct
PVELKY

SEQ ID NO: 39900 - protein, 6 aa, synthetic construct
PVELMD

SEQ ID NO: 39901 - protein, 6 aa, synthetic construct
PVELME

SEQ ID NO: 39902 - protein, 6 aa, synthetic construct
PVELMF

SEQ ID NO: 39903 - protein, 6 aa, synthetic construct
PVELMW

SEQ ID NO: 39904 - protein, 6 aa, synthetic construct
PVELMY

SEQ ID NO: 39905 - protein, 6 aa, synthetic construct
PVELFD

SEQ ID NO: 39906 - protein, 6 aa, synthetic construct
PVELFE

SEQ ID NO: 39907 - protein, 6 aa, synthetic construct
PVELFF

SEQ ID NO: 39908 - protein, 6 aa, synthetic construct
PVELFW

SEQ ID NO: 39909 - protein, 6 aa, synthetic construct
PVELFY

SEQ ID NO: 39910 - protein, 6 aa, synthetic construct
PVELPD

SEQ ID NO: 39911 - protein, 6 aa, synthetic construct
PVELPE

SEQ ID NO: 39912 - protein, 6 aa, synthetic construct
PVELPF

SEQ ID NO: 39913 - protein, 6 aa, synthetic construct
PVELPW

SEQ ID NO: 39914 - protein, 6 aa, synthetic construct
PVELPY

SEQ ID NO: 39915 - protein, 6 aa, synthetic construct
PVELSD

SEQ ID NO: 39916 - protein, 6 aa, synthetic construct
PVELSE

SEQ ID NO: 39917 - protein, 6 aa, synthetic construct
PVELSF

SEQ ID NO: 39918 - protein, 6 aa, synthetic construct
PVELSW

SEQ ID NO: 39919 - protein, 6 aa, synthetic construct
PVELSY

SEQ ID NO: 39920 - protein, 6 aa, synthetic construct
PVELTD

SEQ ID NO: 39921 - protein, 6 aa, synthetic construct
PVELTE

SEQ ID NO: 39922 - protein, 6 aa, synthetic construct
PVELTF

SEQ ID NO: 39923 - protein, 6 aa, synthetic construct
PVELTW

SEQ ID NO: 39924 - protein, 6 aa, synthetic construct
PVELTY

SEQ ID NO: 39925 - protein, 6 aa, synthetic construct
PVELWD

SEQ ID NO: 39926 - protein, 6 aa, synthetic construct
PVELWE

SEQ ID NO: 39927 - protein, 6 aa, synthetic construct
PVELWF

SEQ ID NO: 39928 - protein, 6 aa, synthetic construct
PVELWW

SEQ ID NO: 39929 - protein, 6 aa, synthetic construct
PVELWY

SEQ ID NO: 39930 - protein, 6 aa, synthetic construct
PVELYD

SEQ ID NO: 39931 - protein, 6 aa, synthetic construct
PVELYE

SEQ ID NO: 39932 - protein, 6 aa, synthetic construct
PVELYF

SEQ ID NO: 39933 - protein, 6 aa, synthetic construct
PVELYW

SEQ ID NO: 39934 - protein, 6 aa, synthetic construct
PVELYY

SEQ ID NO: 39935 - protein, 6 aa, synthetic construct
PVELVD

SEQ ID NO: 39936 - protein, 6 aa, synthetic construct
PVELVE

SEQ ID NO: 39937 - protein, 6 aa, synthetic construct
PVELVF

SEQ ID NO: 39938 - protein, 6 aa, synthetic construct
PVELVW

SEQ ID NO: 39939 - protein, 6 aa, synthetic construct
PVELVY

SEQ ID NO: 39940 - protein, 6 aa, synthetic construct
PVEKAD

SEQ ID NO: 39941 - protein, 6 aa, synthetic construct
PVEKAE

SEQ ID NO: 39942 - protein, 6 aa, synthetic construct
PVEKAF

SEQ ID NO: 39943 - protein, 6 aa, synthetic construct
PVEKAW

SEQ ID NO: 39944 - protein, 6 aa, synthetic construct
PVEKAY

SEQ ID NO: 39945 - protein, 6 aa, synthetic construct
PVEKRD

SEQ ID NO: 39946 - protein, 6 aa, synthetic construct
PVEKRE

SEQ ID NO: 39947 - protein, 6 aa, synthetic construct
PVEKRF

SEQ ID NO: 39948 - protein, 6 aa, synthetic construct
PVEKRW

SEQ ID NO: 39949 - protein, 6 aa, synthetic construct
PVEKRY

SEQ ID NO: 39950 - protein, 6 aa, synthetic construct
PVEKND

SEQ ID NO: 39951 - protein, 6 aa, synthetic construct
PVEKNE

SEQ ID NO: 39952 - protein, 6 aa, synthetic construct
PVEKNF

SEQ ID NO: 39953 - protein, 6 aa, synthetic construct
PVEKNW

SEQ ID NO: 39954 - protein, 6 aa, synthetic construct
PVEKNY

SEQ ID NO: 39955 - protein, 6 aa, synthetic construct
PVEKDD

SEQ ID NO: 39956 - protein, 6 aa, synthetic construct
PVEKDE

SEQ ID NO: 39957 - protein, 6 aa, synthetic construct
PVEKDF

SEQ ID NO: 39958 - protein, 6 aa, synthetic construct
PVEKDW

SEQ ID NO: 39959 - protein, 6 aa, synthetic construct
PVEKDY

SEQ ID NO: 39960 - protein, 6 aa, synthetic construct
PVEKCD

SEQ ID NO: 39961 - protein, 6 aa, synthetic construct
PVEKCE

SEQ ID NO: 39962 - protein, 6 aa, synthetic construct
PVEKCF

SEQ ID NO: 39963 - protein, 6 aa, synthetic construct
PVEKCW

SEQ ID NO: 39964 - protein, 6 aa, synthetic construct
PVEKCY

SEQ ID NO: 39965 - protein, 6 aa, synthetic construct
PVEKQD

SEQ ID NO: 39966 - protein, 6 aa, synthetic construct
PVEKQE

SEQ ID NO: 39967 - protein, 6 aa, synthetic construct
PVEKQF

SEQ ID NO: 39968 - protein, 6 aa, synthetic construct
PVEKQW

SEQ ID NO: 39969 - protein, 6 aa, synthetic construct
PVEKQY

SEQ ID NO: 39970 - protein, 6 aa, synthetic construct
PVEKED

SEQ ID NO: 39971 - protein, 6 aa, synthetic construct
PVEKEE

SEQ ID NO: 39972 - protein, 6 aa, synthetic construct
PVEKEF

SEQ ID NO: 39973 - protein, 6 aa, synthetic construct
PVEKEW

SEQ ID NO: 39974 - protein, 6 aa, synthetic construct
PVEKEY

SEQ ID NO: 39975 - protein, 6 aa, synthetic construct
PVEKGD

SEQ ID NO: 39976 - protein, 6 aa, synthetic construct
PVEKGE

SEQ ID NO: 39977 - protein, 6 aa, synthetic construct
PVEKGF

SEQ ID NO: 39978 - protein, 6 aa, synthetic construct
PVEKGW

SEQ ID NO: 39979 - protein, 6 aa, synthetic construct
PVEKGY

SEQ ID NO: 39980 - protein, 6 aa, synthetic construct
PVEKHD

SEQ ID NO: 39981 - protein, 6 aa, synthetic construct
PVEKHE

SEQ ID NO: 39982 - protein, 6 aa, synthetic construct
PVEKHF

SEQ ID NO: 39983 - protein, 6 aa, synthetic construct
PVEKHW

SEQ ID NO: 39984 - protein, 6 aa, synthetic construct
PVEKHY

SEQ ID NO: 39985 - protein, 6 aa, synthetic construct
PVEKID

SEQ ID NO: 39986 - protein, 6 aa, synthetic construct
PVEKIE

SEQ ID NO: 39987 - protein, 6 aa, synthetic construct
PVEKIF

SEQ ID NO: 39988 - protein, 6 aa, synthetic construct
PVEKIW

SEQ ID NO: 39989 - protein, 6 aa, synthetic construct
PVEKIY

SEQ ID NO: 39990 - protein, 6 aa, synthetic construct
PVEKLD

SEQ ID NO: 39991 - protein, 6 aa, synthetic construct
PVEKLE

SEQ ID NO: 39992 - protein, 6 aa, synthetic construct
PVEKLF

SEQ ID NO: 39993 - protein, 6 aa, synthetic construct
PVEKLW

SEQ ID NO: 39994 - protein, 6 aa, synthetic construct
PVEKLY

SEQ ID NO: 39995 - protein, 6 aa, synthetic construct
PVEKKD

SEQ ID NO: 39996 - protein, 6 aa, synthetic construct
PVEKKE

SEQ ID NO: 39997 - protein, 6 aa, synthetic construct
PVEKKF

SEQ ID NO: 39998 - protein, 6 aa, synthetic construct
PVEKKW

SEQ ID NO: 39999 - protein, 6 aa, synthetic construct
PVEKKY

SEQ ID NO: 40000 - protein, 6 aa, synthetic construct
PVEKMD

SEQ ID NO: 40001 - protein, 6 aa, synthetic construct
PVEKME

SEQ ID NO: 40002 - protein, 6 aa, synthetic construct
PVEKMF

SEQ ID NO: 40003 - protein, 6 aa, synthetic construct
PVEKMW

SEQ ID NO: 40004 - protein, 6 aa, synthetic construct
PVEKMY

SEQ ID NO: 40005 - protein, 6 aa, synthetic construct
PVEKFD

SEQ ID NO: 40006 - protein, 6 aa, synthetic construct
PVEKFE

SEQ ID NO: 40007 - protein, 6 aa, synthetic construct
PVEKFF

SEQ ID NO: 40008 - protein, 6 aa, synthetic construct
PVEKFW

SEQ ID NO: 40009 - protein, 6 aa, synthetic construct
PVEKFY

SEQ ID NO: 40010 - protein, 6 aa, synthetic construct
PVEKPD

SEQ ID NO: 40011 - protein, 6 aa, synthetic construct
PVEKPE

SEQ ID NO: 40012 - protein, 6 aa, synthetic construct
PVEKPF

SEQ ID NO: 40013 - protein, 6 aa, synthetic construct
PVEKPW

SEQ ID NO: 40014 - protein, 6 aa, synthetic construct
PVEKPY

SEQ ID NO: 40015 - protein, 6 aa, synthetic construct
PVEKSD

SEQ ID NO: 40016 - protein, 6 aa, synthetic construct
PVEKSE

SEQ ID NO: 40017 - protein, 6 aa, synthetic construct
PVEKSF

SEQ ID NO: 40018 - protein, 6 aa, synthetic construct
PVEKSW

SEQ ID NO: 40019 - protein, 6 aa, synthetic construct
PVEKSY

SEQ ID NO: 40020 - protein, 6 aa, synthetic construct
PVEKTD

SEQ ID NO: 40021 - protein, 6 aa, synthetic construct
PVEKTE

SEQ ID NO: 40022 - protein, 6 aa, synthetic construct
PVEKTF

SEQ ID NO: 40023 - protein, 6 aa, synthetic construct
PVEKTW

SEQ ID NO: 40024 - protein, 6 aa, synthetic construct
PVEKTY

SEQ ID NO: 40025 - protein, 6 aa, synthetic construct
PVEKWD

SEQ ID NO: 40026 - protein, 6 aa, synthetic construct
PVEKWE

SEQ ID NO: 40027 - protein, 6 aa, synthetic construct
PVEKWF

SEQ ID NO: 40028 - protein, 6 aa, synthetic construct
PVEKWW

SEQ ID NO: 40029 - protein, 6 aa, synthetic construct
PVEKWY

SEQ ID NO: 40030 - protein, 6 aa, synthetic construct
PVEKYD

SEQ ID NO: 40031 - protein, 6 aa, synthetic construct
PVEKYE

SEQ ID NO: 40032 - protein, 6 aa, synthetic construct
PVEKYF

SEQ ID NO: 40033 - protein, 6 aa, synthetic construct
PVEKYW

SEQ ID NO: 40034 - protein, 6 aa, synthetic construct
PVEKYY

SEQ ID NO: 40035 - protein, 6 aa, synthetic construct
PVEKVD

SEQ ID NO: 40036 - protein, 6 aa, synthetic construct
PVEKVE

SEQ ID NO: 40037 - protein, 6 aa, synthetic construct
PVEKVF

SEQ ID NO: 40038 - protein, 6 aa, synthetic construct
PVEKVW

SEQ ID NO: 40039 - protein, 6 aa, synthetic construct
PVEKVY

SEQ ID NO: 40040 - protein, 6 aa, synthetic construct
PVEMAD

SEQ ID NO: 40041 - protein, 6 aa, synthetic construct
PVEMAE

SEQ ID NO: 40042 - protein, 6 aa, synthetic construct
PVEMAF

SEQ ID NO: 40043 - protein, 6 aa, synthetic construct
PVEMAW

SEQ ID NO: 40044 - protein, 6 aa, synthetic construct
PVEMAY

SEQ ID NO: 40045 - protein, 6 aa, synthetic construct
PVEMRD

SEQ ID NO: 40046 - protein, 6 aa, synthetic construct
PVEMRE

SEQ ID NO: 40047 - protein, 6 aa, synthetic construct
PVEMRF

SEQ ID NO: 40048 - protein, 6 aa, synthetic construct
PVEMRW

SEQ ID NO: 40049 - protein, 6 aa, synthetic construct
PVEMRY

SEQ ID NO: 40050 - protein, 6 aa, synthetic construct
PVEMND

SEQ ID NO: 40051 - protein, 6 aa, synthetic construct
PVEMNE

SEQ ID NO: 40052 - protein, 6 aa, synthetic construct
PVEMNF

SEQ ID NO: 40053 - protein, 6 aa, synthetic construct
PVEMNW

SEQ ID NO: 40054 - protein, 6 aa, synthetic construct
PVEMNY

SEQ ID NO: 40055 - protein, 6 aa, synthetic construct
PVEMDD

SEQ ID NO: 40056 - protein, 6 aa, synthetic construct
PVEMDE

SEQ ID NO: 40057 - protein, 6 aa, synthetic construct
PVEMDF

SEQ ID NO: 40058 - protein, 6 aa, synthetic construct
PVEMDW

SEQ ID NO: 40059 - protein, 6 aa, synthetic construct
PVEMDY

SEQ ID NO: 40060 - protein, 6 aa, synthetic construct
PVEMCD

SEQ ID NO: 40061 - protein, 6 aa, synthetic construct
PVEMCE

SEQ ID NO: 40062 - protein, 6 aa, synthetic construct
PVEMCF

SEQ ID NO: 40063 - protein, 6 aa, synthetic construct
PVEMCW

SEQ ID NO: 40064 - protein, 6 aa, synthetic construct
PVEMCY

SEQ ID NO: 40065 - protein, 6 aa, synthetic construct
PVEMQD

SEQ ID NO: 40066 - protein, 6 aa, synthetic construct
PVEMQE

SEQ ID NO: 40067 - protein, 6 aa, synthetic construct
PVEMQF

SEQ ID NO: 40068 - protein, 6 aa, synthetic construct
PVEMQW

SEQ ID NO: 40069 - protein, 6 aa, synthetic construct
PVEMQY

SEQ ID NO: 40070 - protein, 6 aa, synthetic construct
PVEMED

SEQ ID NO: 40071 - protein, 6 aa, synthetic construct
PVEMEE

SEQ ID NO: 40072 - protein, 6 aa, synthetic construct
PVEMEF

SEQ ID NO: 40073 - protein, 6 aa, synthetic construct
PVEMEW

SEQ ID NO: 40074 - protein, 6 aa, synthetic construct
PVEMEY

SEQ ID NO: 40075 - protein, 6 aa, synthetic construct
PVEMGD

SEQ ID NO: 40076 - protein, 6 aa, synthetic construct
PVEMGE

SEQ ID NO: 40077 - protein, 6 aa, synthetic construct
PVEMGF

SEQ ID NO: 40078 - protein, 6 aa, synthetic construct
PVEMGW

SEQ ID NO: 40079 - protein, 6 aa, synthetic construct
PVEMGY

SEQ ID NO: 40080 - protein, 6 aa, synthetic construct
PVEMHD

SEQ ID NO: 40081 - protein, 6 aa, synthetic construct
PVEMHE

SEQ ID NO: 40082 - protein, 6 aa, synthetic construct
PVEMHF

SEQ ID NO: 40083 - protein, 6 aa, synthetic construct
PVEMHW

SEQ ID NO: 40084 - protein, 6 aa, synthetic construct
PVEMHY

SEQ ID NO: 40085 - protein, 6 aa, synthetic construct
PVEMID

SEQ ID NO: 40086 - protein, 6 aa, synthetic construct
PVEMIE

SEQ ID NO: 40087 - protein, 6 aa, synthetic construct
PVEMIF

SEQ ID NO: 40088 - protein, 6 aa, synthetic construct
PVEMIW

SEQ ID NO: 40089 - protein, 6 aa, synthetic construct
PVEMIY

SEQ ID NO: 40090 - protein, 6 aa, synthetic construct
PVEMLD

SEQ ID NO: 40091 - protein, 6 aa, synthetic construct
PVEMLE

SEQ ID NO: 40092 - protein, 6 aa, synthetic construct
PVEMLF

SEQ ID NO: 40093 - protein, 6 aa, synthetic construct
PVEMLW

SEQ ID NO: 40094 - protein, 6 aa, synthetic construct
PVEMLY

SEQ ID NO: 40095 - protein, 6 aa, synthetic construct
PVEMKD

SEQ ID NO: 40096 - protein, 6 aa, synthetic construct
PVEMKE

SEQ ID NO: 40097 - protein, 6 aa, synthetic construct
PVEMKF

SEQ ID NO: 40098 - protein, 6 aa, synthetic construct
PVEMKW

SEQ ID NO: 40099 - protein, 6 aa, synthetic construct
PVEMKY

SEQ ID NO: 40100 - protein, 6 aa, synthetic construct
PVEMMD

SEQ ID NO: 40101 - protein, 6 aa, synthetic construct
PVEMME

SEQ ID NO: 40102 - protein, 6 aa, synthetic construct
PVEMMF

SEQ ID NO: 40103 - protein, 6 aa, synthetic construct
PVEMMW

SEQ ID NO: 40104 - protein, 6 aa, synthetic construct
PVEMMY

SEQ ID NO: 40105 - protein, 6 aa, synthetic construct
PVEMFD

SEQ ID NO: 40106 - protein, 6 aa, synthetic construct
PVEMFE

SEQ ID NO: 40107 - protein, 6 aa, synthetic construct
PVEMFF

SEQ ID NO: 40108 - protein, 6 aa, synthetic construct
PVEMFW

SEQ ID NO: 40109 - protein, 6 aa, synthetic construct
PVEMFY

SEQ ID NO: 40110 - protein, 6 aa, synthetic construct
PVEMPD

SEQ ID NO: 40111 - protein, 6 aa, synthetic construct
PVEMPE

SEQ ID NO: 40112 - protein, 6 aa, synthetic construct
PVEMPF

SEQ ID NO: 40113 - protein, 6 aa, synthetic construct
PVEMPW

SEQ ID NO: 40114 - protein, 6 aa, synthetic construct
PVEMPY

SEQ ID NO: 40115 - protein, 6 aa, synthetic construct
PVEMSD

SEQ ID NO: 40116 - protein, 6 aa, synthetic construct
PVEMSE

SEQ ID NO: 40117 - protein, 6 aa, synthetic construct
PVEMSF

SEQ ID NO: 40118 - protein, 6 aa, synthetic construct
PVEMSW

SEQ ID NO: 40119 - protein, 6 aa, synthetic construct
PVEMSY

SEQ ID NO: 40120 - protein, 6 aa, synthetic construct
PVEMTD

SEQ ID NO: 40121 - protein, 6 aa, synthetic construct
PVEMTE

SEQ ID NO: 40122 - protein, 6 aa, synthetic construct
PVEMTF

SEQ ID NO: 40123 - protein, 6 aa, synthetic construct
PVEMTW

SEQ ID NO: 40124 - protein, 6 aa, synthetic construct
PVEMTY

SEQ ID NO: 40125 - protein, 6 aa, synthetic construct
PVEMWD

SEQ ID NO: 40126 - protein, 6 aa, synthetic construct
PVEMWE

SEQ ID NO: 40127 - protein, 6 aa, synthetic construct
PVEMWF

SEQ ID NO: 40128 - protein, 6 aa, synthetic construct
PVEMWW

SEQ ID NO: 40129 - protein, 6 aa, synthetic construct
PVEMWY

SEQ ID NO: 40130 - protein, 6 aa, synthetic construct
PVEMYD

SEQ ID NO: 40131 - protein, 6 aa, synthetic construct
PVEMYE

SEQ ID NO: 40132 - protein, 6 aa, synthetic construct
PVEMYF

SEQ ID NO: 40133 - protein, 6 aa, synthetic construct
PVEMYW

SEQ ID NO: 40134 - protein, 6 aa, synthetic construct
PVEMYY

SEQ ID NO: 40135 - protein, 6 aa, synthetic construct
PVEMVD

SEQ ID NO: 40136 - protein, 6 aa, synthetic construct
PVEMVE

SEQ ID NO: 40137 - protein, 6 aa, synthetic construct
PVEMVF

SEQ ID NO: 40138 - protein, 6 aa, synthetic construct
PVEMVW

SEQ ID NO: 40139 - protein, 6 aa, synthetic construct
PVEMVY

SEQ ID NO: 40140 - protein, 6 aa, synthetic construct
PVEFAD

SEQ ID NO: 40141 - protein, 6 aa, synthetic construct
PVEFAE

SEQ ID NO: 40142 - protein, 6 aa, synthetic construct
PVEFAF

SEQ ID NO: 40143 - protein, 6 aa, synthetic construct
PVEFAW

SEQ ID NO: 40144 - protein, 6 aa, synthetic construct
PVEFAY

SEQ ID NO: 40145 - protein, 6 aa, synthetic construct
PVEFRD

SEQ ID NO: 40146 - protein, 6 aa, synthetic construct
PVEFRE

SEQ ID NO: 40147 - protein, 6 aa, synthetic construct
PVEFRF

SEQ ID NO: 40148 - protein, 6 aa, synthetic construct
PVEFRW

SEQ ID NO: 40149 - protein, 6 aa, synthetic construct
PVEFRY

SEQ ID NO: 40150 - protein, 6 aa, synthetic construct
PVEFND

SEQ ID NO: 40151 - protein, 6 aa, synthetic construct
PVEFNE

SEQ ID NO: 40152 - protein, 6 aa, synthetic construct
PVEFNF

SEQ ID NO: 40153 - protein, 6 aa, synthetic construct
PVEFNW

SEQ ID NO: 40154 - protein, 6 aa, synthetic construct
PVEFNY

SEQ ID NO: 40155 - protein, 6 aa, synthetic construct
PVEFDD

SEQ ID NO: 40156 - protein, 6 aa, synthetic construct
PVEFDE

SEQ ID NO: 40157 - protein, 6 aa, synthetic construct
PVEFDF

SEQ ID NO: 40158 - protein, 6 aa, synthetic construct
PVEFDW

SEQ ID NO: 40159 - protein, 6 aa, synthetic construct
PVEFDY

SEQ ID NO: 40160 - protein, 6 aa, synthetic construct
PVEFCD

SEQ ID NO: 40161 - protein, 6 aa, synthetic construct
PVEFCE

SEQ ID NO: 40162 - protein, 6 aa, synthetic construct
PVEFCF

SEQ ID NO: 40163 - protein, 6 aa, synthetic construct
PVEFCW

SEQ ID NO: 40164 - protein, 6 aa, synthetic construct
PVEFCY

SEQ ID NO: 40165 - protein, 6 aa, synthetic construct
PVEFQD

SEQ ID NO: 40166 - protein, 6 aa, synthetic construct
PVEFQE

SEQ ID NO: 40167 - protein, 6 aa, synthetic construct
PVEFQF

SEQ ID NO: 40168 - protein, 6 aa, synthetic construct
PVEFQW

SEQ ID NO: 40169 - protein, 6 aa, synthetic construct
PVEFQY

SEQ ID NO: 40170 - protein, 6 aa, synthetic construct
PVEFED

SEQ ID NO: 40171 - protein, 6 aa, synthetic construct
PVEFEE

SEQ ID NO: 40172 - protein, 6 aa, synthetic construct
PVEFEF

SEQ ID NO: 40173 - protein, 6 aa, synthetic construct
PVEFEW

SEQ ID NO: 40174 - protein, 6 aa, synthetic construct
PVEFEY

SEQ ID NO: 40175 - protein, 6 aa, synthetic construct
PVEFGD

SEQ ID NO: 40176 - protein, 6 aa, synthetic construct
PVEFGE

SEQ ID NO: 40177 - protein, 6 aa, synthetic construct
PVEFGF

SEQ ID NO: 40178 - protein, 6 aa, synthetic construct
PVEFGW

SEQ ID NO: 40179 - protein, 6 aa, synthetic construct
PVEFGY

SEQ ID NO: 40180 - protein, 6 aa, synthetic construct
PVEFHD

SEQ ID NO: 40181 - protein, 6 aa, synthetic construct
PVEFHE

SEQ ID NO: 40182 - protein, 6 aa, synthetic construct
PVEFHF

SEQ ID NO: 40183 - protein, 6 aa, synthetic construct
PVEFHW

SEQ ID NO: 40184 - protein, 6 aa, synthetic construct
PVEFHY

SEQ ID NO: 40185 - protein, 6 aa, synthetic construct
PVEFID

SEQ ID NO: 40186 - protein, 6 aa, synthetic construct
PVEFIE

SEQ ID NO: 40187 - protein, 6 aa, synthetic construct
PVEFIF

SEQ ID NO: 40188 - protein, 6 aa, synthetic construct
PVEFIW

SEQ ID NO: 40189 - protein, 6 aa, synthetic construct
PVEFIY

SEQ ID NO: 40190 - protein, 6 aa, synthetic construct
PVEFLD

SEQ ID NO: 40191 - protein, 6 aa, synthetic construct
PVEFLE

SEQ ID NO: 40192 - protein, 6 aa, synthetic construct
PVEFLF

SEQ ID NO: 40193 - protein, 6 aa, synthetic construct
PVEFLW

SEQ ID NO: 40194 - protein, 6 aa, synthetic construct
PVEFLY

SEQ ID NO: 40195 - protein, 6 aa, synthetic construct
PVEFKD

SEQ ID NO: 40196 - protein, 6 aa, synthetic construct
PVEFKE

SEQ ID NO: 40197 - protein, 6 aa, synthetic construct
PVEFKF

SEQ ID NO: 40198 - protein, 6 aa, synthetic construct
PVEFKW

SEQ ID NO: 40199 - protein, 6 aa, synthetic construct
PVEFKY

SEQ ID NO: 40200 - protein, 6 aa, synthetic construct
PVEFMD

SEQ ID NO: 40201 - protein, 6 aa, synthetic construct
PVEFME

SEQ ID NO: 40202 - protein, 6 aa, synthetic construct
PVEFMF

SEQ ID NO: 40203 - protein, 6 aa, synthetic construct
PVEFMW

SEQ ID NO: 40204 - protein, 6 aa, synthetic construct
PVEFMY

SEQ ID NO: 40205 - protein, 6 aa, synthetic construct
PVEFFD

SEQ ID NO: 40206 - protein, 6 aa, synthetic construct
PVEFFE

SEQ ID NO: 40207 - protein, 6 aa, synthetic construct
PVEFFF

SEQ ID NO: 40208 - protein, 6 aa, synthetic construct
PVEFFW

SEQ ID NO: 40209 - protein, 6 aa, synthetic construct
PVEFFY

SEQ ID NO: 40210 - protein, 6 aa, synthetic construct
PVEFPD

SEQ ID NO: 40211 - protein, 6 aa, synthetic construct
PVEFPE

SEQ ID NO: 40212 - protein, 6 aa, synthetic construct
PVEFPF

SEQ ID NO: 40213 - protein, 6 aa, synthetic construct
PVEFPW

SEQ ID NO: 40214 - protein, 6 aa, synthetic construct
PVEFPY

SEQ ID NO: 40215 - protein, 6 aa, synthetic construct
PVEFSD

SEQ ID NO: 40216 - protein, 6 aa, synthetic construct
PVEFSE

SEQ ID NO: 40217 - protein, 6 aa, synthetic construct
PVEFSF

SEQ ID NO: 40218 - protein, 6 aa, synthetic construct
PVEFSW

SEQ ID NO: 40219 - protein, 6 aa, synthetic construct
PVEFSY

SEQ ID NO: 40220 - protein, 6 aa, synthetic construct
PVEFTD

SEQ ID NO: 40221 - protein, 6 aa, synthetic construct
PVEFTE

SEQ ID NO: 40222 - protein, 6 aa, synthetic construct
PVEFTF

SEQ ID NO: 40223 - protein, 6 aa, synthetic construct
PVEFTW

SEQ ID NO: 40224 - protein, 6 aa, synthetic construct
PVEFTY

SEQ ID NO: 40225 - protein, 6 aa, synthetic construct
PVEFWD

SEQ ID NO: 40226 - protein, 6 aa, synthetic construct
PVEFWE

SEQ ID NO: 40227 - protein, 6 aa, synthetic construct
PVEFWF

SEQ ID NO: 40228 - protein, 6 aa, synthetic construct
PVEFWW

SEQ ID NO: 40229 - protein, 6 aa, synthetic construct
PVEFWY

SEQ ID NO: 40230 - protein, 6 aa, synthetic construct
PVEFYD

SEQ ID NO: 40231 - protein, 6 aa, synthetic construct
PVEFYE

SEQ ID NO: 40232 - protein, 6 aa, synthetic construct
PVEFYF

SEQ ID NO: 40233 - protein, 6 aa, synthetic construct
PVEFYW

SEQ ID NO: 40234 - protein, 6 aa, synthetic construct
PVEFYY

SEQ ID NO: 40235 - protein, 6 aa, synthetic construct
PVEFVD

SEQ ID NO: 40236 - protein, 6 aa, synthetic construct
PVEFVE

SEQ ID NO: 40237 - protein, 6 aa, synthetic construct
PVEFVF

SEQ ID NO: 40238 - protein, 6 aa, synthetic construct
PVEFVW

SEQ ID NO: 40239 - protein, 6 aa, synthetic construct
PVEFVY

SEQ ID NO: 40240 - protein, 6 aa, synthetic construct
PVEPAD

SEQ ID NO: 40241 - protein, 6 aa, synthetic construct
PVEPAE

SEQ ID NO: 40242 - protein, 6 aa, synthetic construct
PVEPAF

SEQ ID NO: 40243 - protein, 6 aa, synthetic construct
PVEPAW

SEQ ID NO: 40244 - protein, 6 aa, synthetic construct
PVEPAY

SEQ ID NO: 40245 - protein, 6 aa, synthetic construct
PVEPRD

SEQ ID NO: 40246 - protein, 6 aa, synthetic construct
PVEPRE

SEQ ID NO: 40247 - protein, 6 aa, synthetic construct
PVEPRF

SEQ ID NO: 40248 - protein, 6 aa, synthetic construct
PVEPRW

SEQ ID NO: 40249 - protein, 6 aa, synthetic construct
PVEPRY

SEQ ID NO: 40250 - protein, 6 aa, synthetic construct
PVEPND

SEQ ID NO: 40251 - protein, 6 aa, synthetic construct
PVEPNE

SEQ ID NO: 40252 - protein, 6 aa, synthetic construct
PVEPNF

SEQ ID NO: 40253 - protein, 6 aa, synthetic construct
PVEPNW

SEQ ID NO: 40254 - protein, 6 aa, synthetic construct
PVEPNY

SEQ ID NO: 40255 - protein, 6 aa, synthetic construct
PVEPDD

SEQ ID NO: 40256 - protein, 6 aa, synthetic construct
PVEPDE

SEQ ID NO: 40257 - protein, 6 aa, synthetic construct
PVEPDF

SEQ ID NO: 40258 - protein, 6 aa, synthetic construct
PVEPDW

SEQ ID NO: 40259 - protein, 6 aa, synthetic construct
PVEPDY

SEQ ID NO: 40260 - protein, 6 aa, synthetic construct
PVEPCD

SEQ ID NO: 40261 - protein, 6 aa, synthetic construct
PVEPCE

SEQ ID NO: 40262 - protein, 6 aa, synthetic construct
PVEPCF

SEQ ID NO: 40263 - protein, 6 aa, synthetic construct
PVEPCW

SEQ ID NO: 40264 - protein, 6 aa, synthetic construct
PVEPCY

SEQ ID NO: 40265 - protein, 6 aa, synthetic construct
PVEPQD

SEQ ID NO: 40266 - protein, 6 aa, synthetic construct
PVEPQE

SEQ ID NO: 40267 - protein, 6 aa, synthetic construct
PVEPQF

SEQ ID NO: 40268 - protein, 6 aa, synthetic construct
PVEPQW

SEQ ID NO: 40269 - protein, 6 aa, synthetic construct
PVEPQY

SEQ ID NO: 40270 - protein, 6 aa, synthetic construct
PVEPED

SEQ ID NO: 40271 - protein, 6 aa, synthetic construct
PVEPEE

SEQ ID NO: 40272 - protein, 6 aa, synthetic construct
PVEPEF

SEQ ID NO: 40273 - protein, 6 aa, synthetic construct
PVEPEW

SEQ ID NO: 40274 - protein, 6 aa, synthetic construct
PVEPEY

SEQ ID NO: 40275 - protein, 6 aa, synthetic construct
PVEPGD

SEQ ID NO: 40276 - protein, 6 aa, synthetic construct
PVEPGE

SEQ ID NO: 40277 - protein, 6 aa, synthetic construct
PVEPGF

SEQ ID NO: 40278 - protein, 6 aa, synthetic construct
PVEPGW

SEQ ID NO: 40279 - protein, 6 aa, synthetic construct
PVEPGY

SEQ ID NO: 40280 - protein, 6 aa, synthetic construct
PVEPHD

SEQ ID NO: 40281 - protein, 6 aa, synthetic construct
PVEPHE

SEQ ID NO: 40282 - protein, 6 aa, synthetic construct
PVEPHF

SEQ ID NO: 40283 - protein, 6 aa, synthetic construct
PVEPHW

SEQ ID NO: 40284 - protein, 6 aa, synthetic construct
PVEPHY

SEQ ID NO: 40285 - protein, 6 aa, synthetic construct
PVEPID

SEQ ID NO: 40286 - protein, 6 aa, synthetic construct
PVEPIE

SEQ ID NO: 40287 - protein, 6 aa, synthetic construct
PVEPIF

SEQ ID NO: 40288 - protein, 6 aa, synthetic construct
PVEPIW

SEQ ID NO: 40289 - protein, 6 aa, synthetic construct
PVEPIY

SEQ ID NO: 40290 - protein, 6 aa, synthetic construct
PVEPLD

SEQ ID NO: 40291 - protein, 6 aa, synthetic construct
PVEPLE

SEQ ID NO: 40292 - protein, 6 aa, synthetic construct
PVEPLF

SEQ ID NO: 40293 - protein, 6 aa, synthetic construct
PVEPLW

SEQ ID NO: 40294 - protein, 6 aa, synthetic construct
PVEPLY

SEQ ID NO: 40295 - protein, 6 aa, synthetic construct
PVEPKD

SEQ ID NO: 40296 - protein, 6 aa, synthetic construct
PVEPKE

SEQ ID NO: 40297 - protein, 6 aa, synthetic construct
PVEPKF

SEQ ID NO: 40298 - protein, 6 aa, synthetic construct
PVEPKW

SEQ ID NO: 40299 - protein, 6 aa, synthetic construct
PVEPKY

SEQ ID NO: 40300 - protein, 6 aa, synthetic construct
PVEPMD

SEQ ID NO: 40301 - protein, 6 aa, synthetic construct
PVEPME

SEQ ID NO: 40302 - protein, 6 aa, synthetic construct
PVEPMF

SEQ ID NO: 40303 - protein, 6 aa, synthetic construct
PVEPMW

SEQ ID NO: 40304 - protein, 6 aa, synthetic construct
PVEPMY

SEQ ID NO: 40305 - protein, 6 aa, synthetic construct
PVEPFD

SEQ ID NO: 40306 - protein, 6 aa, synthetic construct
PVEPFE

SEQ ID NO: 40307 - protein, 6 aa, synthetic construct
PVEPFF

SEQ ID NO: 40308 - protein, 6 aa, synthetic construct
PVEPFW

SEQ ID NO: 40309 - protein, 6 aa, synthetic construct
PVEPFY

SEQ ID NO: 40310 - protein, 6 aa, synthetic construct
PVEPPD

SEQ ID NO: 40311 - protein, 6 aa, synthetic construct
PVEPPE

SEQ ID NO: 40312 - protein, 6 aa, synthetic construct
PVEPPF

SEQ ID NO: 40313 - protein, 6 aa, synthetic construct
PVEPPW

SEQ ID NO: 40314 - protein, 6 aa, synthetic construct
PVEPPY

SEQ ID NO: 40315 - protein, 6 aa, synthetic construct
PVEPSD

SEQ ID NO: 40316 - protein, 6 aa, synthetic construct
PVEPSE

SEQ ID NO: 40317 - protein, 6 aa, synthetic construct
PVEPSF

SEQ ID NO: 40318 - protein, 6 aa, synthetic construct
PVEPSW

SEQ ID NO: 40319 - protein, 6 aa, synthetic construct
PVEPSY

SEQ ID NO: 40320 - protein, 6 aa, synthetic construct
PVEPTD

SEQ ID NO: 40321 - protein, 6 aa, synthetic construct
PVEPTE

SEQ ID NO: 40322 - protein, 6 aa, synthetic construct
PVEPTF

SEQ ID NO: 40323 - protein, 6 aa, synthetic construct
PVEPTW

SEQ ID NO: 40324 - protein, 6 aa, synthetic construct
PVEPTY

SEQ ID NO: 40325 - protein, 6 aa, synthetic construct
PVEPWD

SEQ ID NO: 40326 - protein, 6 aa, synthetic construct
PVEPWE

SEQ ID NO: 40327 - protein, 6 aa, synthetic construct
PVEPWF

SEQ ID NO: 40328 - protein, 6 aa, synthetic construct
PVEPWW

SEQ ID NO: 40329 - protein, 6 aa, synthetic construct
PVEPWY

SEQ ID NO: 40330 - protein, 6 aa, synthetic construct
PVEPYD

SEQ ID NO: 40331 - protein, 6 aa, synthetic construct
PVEPYE

SEQ ID NO: 40332 - protein, 6 aa, synthetic construct
PVEPYF

SEQ ID NO: 40333 - protein, 6 aa, synthetic construct
PVEPYW

SEQ ID NO: 40334 - protein, 6 aa, synthetic construct
PVEPYY

SEQ ID NO: 40335 - protein, 6 aa, synthetic construct
PVEPVD

SEQ ID NO: 40336 - protein, 6 aa, synthetic construct
PVEPVE

SEQ ID NO: 40337 - protein, 6 aa, synthetic construct
PVEPVF

SEQ ID NO: 40338 - protein, 6 aa, synthetic construct
PVEPVW

SEQ ID NO: 40339 - protein, 6 aa, synthetic construct
PVEPVY

SEQ ID NO: 40340 - protein, 6 aa, synthetic construct
PVESAD

SEQ ID NO: 40341 - protein, 6 aa, synthetic construct
PVESAE

SEQ ID NO: 40342 - protein, 6 aa, synthetic construct
PVESAF

SEQ ID NO: 40343 - protein, 6 aa, synthetic construct
PVESAW

SEQ ID NO: 40344 - protein, 6 aa, synthetic construct
PVESAY

SEQ ID NO: 40345 - protein, 6 aa, synthetic construct
PVESRD

SEQ ID NO: 40346 - protein, 6 aa, synthetic construct
PVESRE

SEQ ID NO: 40347 - protein, 6 aa, synthetic construct
PVESRF

SEQ ID NO: 40348 - protein, 6 aa, synthetic construct
PVESRW

SEQ ID NO: 40349 - protein, 6 aa, synthetic construct
PVESRY

SEQ ID NO: 40350 - protein, 6 aa, synthetic construct
PVESND

SEQ ID NO: 40351 - protein, 6 aa, synthetic construct
PVESNE

SEQ ID NO: 40352 - protein, 6 aa, synthetic construct
PVESNF

SEQ ID NO: 40353 - protein, 6 aa, synthetic construct
PVESNW

SEQ ID NO: 40354 - protein, 6 aa, synthetic construct
PVESNY

SEQ ID NO: 40355 - protein, 6 aa, synthetic construct
PVESDD

SEQ ID NO: 40356 - protein, 6 aa, synthetic construct
PVESDE

SEQ ID NO: 40357 - protein, 6 aa, synthetic construct
PVESDF

SEQ ID NO: 40358 - protein, 6 aa, synthetic construct
PVESDW

SEQ ID NO: 40359 - protein, 6 aa, synthetic construct
PVESDY

SEQ ID NO: 40360 - protein, 6 aa, synthetic construct
PVESCD

SEQ ID NO: 40361 - protein, 6 aa, synthetic construct
PVESCE

SEQ ID NO: 40362 - protein, 6 aa, synthetic construct
PVESCF

SEQ ID NO: 40363 - protein, 6 aa, synthetic construct
PVESCW

SEQ ID NO: 40364 - protein, 6 aa, synthetic construct
PVESCY

SEQ ID NO: 40365 - protein, 6 aa, synthetic construct
PVESQD

SEQ ID NO: 40366 - protein, 6 aa, synthetic construct
PVESQE

SEQ ID NO: 40367 - protein, 6 aa, synthetic construct
PVESQF

SEQ ID NO: 40368 - protein, 6 aa, synthetic construct
PVESQW

SEQ ID NO: 40369 - protein, 6 aa, synthetic construct
PVESQY

SEQ ID NO: 40370 - protein, 6 aa, synthetic construct
PVESED

SEQ ID NO: 40371 - protein, 6 aa, synthetic construct
PVESEE

SEQ ID NO: 40372 - protein, 6 aa, synthetic construct
PVESEF

SEQ ID NO: 40373 - protein, 6 aa, synthetic construct
PVESEW

SEQ ID NO: 40374 - protein, 6 aa, synthetic construct
PVESEY

SEQ ID NO: 40375 - protein, 6 aa, synthetic construct
PVESGD

SEQ ID NO: 40376 - protein, 6 aa, synthetic construct
PVESGE

SEQ ID NO: 40377 - protein, 6 aa, synthetic construct
PVESGF

SEQ ID NO: 40378 - protein, 6 aa, synthetic construct
PVESGW

SEQ ID NO: 40379 - protein, 6 aa, synthetic construct
PVESGY

SEQ ID NO: 40380 - protein, 6 aa, synthetic construct
PVESHD

SEQ ID NO: 40381 - protein, 6 aa, synthetic construct
PVESHE

SEQ ID NO: 40382 - protein, 6 aa, synthetic construct
PVESHF

SEQ ID NO: 40383 - protein, 6 aa, synthetic construct
PVESHW

SEQ ID NO: 40384 - protein, 6 aa, synthetic construct
PVESHY

SEQ ID NO: 40385 - protein, 6 aa, synthetic construct
PVESID

SEQ ID NO: 40386 - protein, 6 aa, synthetic construct
PVESIE

SEQ ID NO: 40387 - protein, 6 aa, synthetic construct
PVESIF

SEQ ID NO: 40388 - protein, 6 aa, synthetic construct
PVESIW

SEQ ID NO: 40389 - protein, 6 aa, synthetic construct
PVESIY

SEQ ID NO: 40390 - protein, 6 aa, synthetic construct
PVESLD

SEQ ID NO: 40391 - protein, 6 aa, synthetic construct
PVESLE

SEQ ID NO: 40392 - protein, 6 aa, synthetic construct
PVESLF

SEQ ID NO: 40393 - protein, 6 aa, synthetic construct
PVESLW

SEQ ID NO: 40394 - protein, 6 aa, synthetic construct
PVESLY

SEQ ID NO: 40395 - protein, 6 aa, synthetic construct
PVESKD

SEQ ID NO: 40396 - protein, 6 aa, synthetic construct
PVESKE

SEQ ID NO: 40397 - protein, 6 aa, synthetic construct
PVESKF

SEQ ID NO: 40398 - protein, 6 aa, synthetic construct
PVESKW

SEQ ID NO: 40399 - protein, 6 aa, synthetic construct
PVESKY

SEQ ID NO: 40400 - protein, 6 aa, synthetic construct
PVESMD

SEQ ID NO: 40401 - protein, 6 aa, synthetic construct
PVESME

SEQ ID NO: 40402 - protein, 6 aa, synthetic construct
PVESMF

SEQ ID NO: 40403 - protein, 6 aa, synthetic construct
PVESMW

SEQ ID NO: 40404 - protein, 6 aa, synthetic construct
PVESMY

SEQ ID NO: 40405 - protein, 6 aa, synthetic construct
PVESFD

SEQ ID NO: 40406 - protein, 6 aa, synthetic construct
PVESFE

SEQ ID NO: 40407 - protein, 6 aa, synthetic construct
PVESFF

SEQ ID NO: 40408 - protein, 6 aa, synthetic construct
PVESFW

SEQ ID NO: 40409 - protein, 6 aa, synthetic construct
PVESFY

SEQ ID NO: 40410 - protein, 6 aa, synthetic construct
PVESPD

SEQ ID NO: 40411 - protein, 6 aa, synthetic construct
PVESPE

SEQ ID NO: 40412 - protein, 6 aa, synthetic construct
PVESPF

SEQ ID NO: 40413 - protein, 6 aa, synthetic construct
PVESPW

SEQ ID NO: 40414 - protein, 6 aa, synthetic construct
PVESPY

SEQ ID NO: 40415 - protein, 6 aa, synthetic construct
PVESSD

SEQ ID NO: 40416 - protein, 6 aa, synthetic construct
PVESSE

SEQ ID NO: 40417 - protein, 6 aa, synthetic construct
PVESSF

SEQ ID NO: 40418 - protein, 6 aa, synthetic construct
PVESSW

SEQ ID NO: 40419 - protein, 6 aa, synthetic construct
PVESSY

SEQ ID NO: 40420 - protein, 6 aa, synthetic construct
PVESTD

SEQ ID NO: 40421 - protein, 6 aa, synthetic construct
PVESTE

SEQ ID NO: 40422 - protein, 6 aa, synthetic construct
PVESTF

SEQ ID NO: 40423 - protein, 6 aa, synthetic construct
PVESTW

SEQ ID NO: 40424 - protein, 6 aa, synthetic construct
PVESTY

SEQ ID NO: 40425 - protein, 6 aa, synthetic construct
PVESWD

SEQ ID NO: 40426 - protein, 6 aa, synthetic construct
PVESWE

SEQ ID NO: 40427 - protein, 6 aa, synthetic construct
PVESWF

SEQ ID NO: 40428 - protein, 6 aa, synthetic construct
PVESWW

SEQ ID NO: 40429 - protein, 6 aa, synthetic construct
PVESWY

SEQ ID NO: 40430 - protein, 6 aa, synthetic construct
PVESYD

SEQ ID NO: 40431 - protein, 6 aa, synthetic construct
PVESYE

SEQ ID NO: 40432 - protein, 6 aa, synthetic construct
PVESYF

SEQ ID NO: 40433 - protein, 6 aa, synthetic construct
PVESYW

SEQ ID NO: 40434 - protein, 6 aa, synthetic construct
PVESYY

SEQ ID NO: 40435 - protein, 6 aa, synthetic construct
PVESVD

SEQ ID NO: 40436 - protein, 6 aa, synthetic construct
PVESVE

SEQ ID NO: 40437 - protein, 6 aa, synthetic construct
PVESVF

SEQ ID NO: 40438 - protein, 6 aa, synthetic construct
PVESVW

SEQ ID NO: 40439 - protein, 6 aa, synthetic construct
PVESVY

SEQ ID NO: 40440 - protein, 6 aa, synthetic construct
PVETAD

SEQ ID NO: 40441 - protein, 6 aa, synthetic construct
PVETAE

SEQ ID NO: 40442 - protein, 6 aa, synthetic construct
PVETAF

SEQ ID NO: 40443 - protein, 6 aa, synthetic construct
PVETAW

SEQ ID NO: 40444 - protein, 6 aa, synthetic construct
PVETAY

SEQ ID NO: 40445 - protein, 6 aa, synthetic construct
PVETRD

SEQ ID NO: 40446 - protein, 6 aa, synthetic construct
PVETRE

SEQ ID NO: 40447 - protein, 6 aa, synthetic construct
PVETRF

SEQ ID NO: 40448 - protein, 6 aa, synthetic construct
PVETRW

SEQ ID NO: 40449 - protein, 6 aa, synthetic construct
PVETRY

SEQ ID NO: 40450 - protein, 6 aa, synthetic construct
PVETND

SEQ ID NO: 40451 - protein, 6 aa, synthetic construct
PVETNE

SEQ ID NO: 40452 - protein, 6 aa, synthetic construct
PVETNF

SEQ ID NO: 40453 - protein, 6 aa, synthetic construct
PVETNW

SEQ ID NO: 40454 - protein, 6 aa, synthetic construct
PVETNY

SEQ ID NO: 40455 - protein, 6 aa, synthetic construct
PVETDD

SEQ ID NO: 40456 - protein, 6 aa, synthetic construct
PVETDE

SEQ ID NO: 40457 - protein, 6 aa, synthetic construct
PVETDF

SEQ ID NO: 40458 - protein, 6 aa, synthetic construct
PVETDW

SEQ ID NO: 40459 - protein, 6 aa, synthetic construct
PVETDY

SEQ ID NO: 40460 - protein, 6 aa, synthetic construct
PVETCD

SEQ ID NO: 40461 - protein, 6 aa, synthetic construct
PVETCE

SEQ ID NO: 40462 - protein, 6 aa, synthetic construct
PVETCF

SEQ ID NO: 40463 - protein, 6 aa, synthetic construct
PVETCW

SEQ ID NO: 40464 - protein, 6 aa, synthetic construct
PVETCY

SEQ ID NO: 40465 - protein, 6 aa, synthetic construct
PVETQD

SEQ ID NO: 40466 - protein, 6 aa, synthetic construct
PVETQE

SEQ ID NO: 40467 - protein, 6 aa, synthetic construct
PVETQF

SEQ ID NO: 40468 - protein, 6 aa, synthetic construct
PVETQW

SEQ ID NO: 40469 - protein, 6 aa, synthetic construct
PVETQY

SEQ ID NO: 40470 - protein, 6 aa, synthetic construct
PVETED

SEQ ID NO: 40471 - protein, 6 aa, synthetic construct
PVETEE

SEQ ID NO: 40472 - protein, 6 aa, synthetic construct
PVETEF

SEQ ID NO: 40473 - protein, 6 aa, synthetic construct
PVETEW

SEQ ID NO: 40474 - protein, 6 aa, synthetic construct
PVETEY

SEQ ID NO: 40475 - protein, 6 aa, synthetic construct
PVETGD

SEQ ID NO: 40476 - protein, 6 aa, synthetic construct
PVETGE

SEQ ID NO: 40477 - protein, 6 aa, synthetic construct
PVETGF

SEQ ID NO: 40478 - protein, 6 aa, synthetic construct
PVETGW

SEQ ID NO: 40479 - protein, 6 aa, synthetic construct
PVETGY

SEQ ID NO: 40480 - protein, 6 aa, synthetic construct
PVETHD

SEQ ID NO: 40481 - protein, 6 aa, synthetic construct
PVETHE

SEQ ID NO: 40482 - protein, 6 aa, synthetic construct
PVETHF

SEQ ID NO: 40483 - protein, 6 aa, synthetic construct
PVETHW

SEQ ID NO: 40484 - protein, 6 aa, synthetic construct
PVETHY

SEQ ID NO: 40485 - protein, 6 aa, synthetic construct
PVETID

SEQ ID NO: 40486 - protein, 6 aa, synthetic construct
PVETIE

SEQ ID NO: 40487 - protein, 6 aa, synthetic construct
PVETIF

SEQ ID NO: 40488 - protein, 6 aa, synthetic construct
PVETIW

SEQ ID NO: 40489 - protein, 6 aa, synthetic construct
PVETIY

SEQ ID NO: 40490 - protein, 6 aa, synthetic construct
PVETLD

SEQ ID NO: 40491 - protein, 6 aa, synthetic construct
PVETLE

SEQ ID NO: 40492 - protein, 6 aa, synthetic construct
PVETLF

SEQ ID NO: 40493 - protein, 6 aa, synthetic construct
PVETLW

SEQ ID NO: 40494 - protein, 6 aa, synthetic construct
PVETLY

SEQ ID NO: 40495 - protein, 6 aa, synthetic construct
PVETKD

SEQ ID NO: 40496 - protein, 6 aa, synthetic construct
PVETKE

SEQ ID NO: 40497 - protein, 6 aa, synthetic construct
PVETKF

SEQ ID NO: 40498 - protein, 6 aa, synthetic construct
PVETKW

SEQ ID NO: 40499 - protein, 6 aa, synthetic construct
PVETKY

SEQ ID NO: 40500 - protein, 6 aa, synthetic construct
PVETMD

SEQ ID NO: 40501 - protein, 6 aa, synthetic construct
PVETME

SEQ ID NO: 40502 - protein, 6 aa, synthetic construct
PVETMF

SEQ ID NO: 40503 - protein, 6 aa, synthetic construct
PVETMW

SEQ ID NO: 40504 - protein, 6 aa, synthetic construct
PVETMY

SEQ ID NO: 40505 - protein, 6 aa, synthetic construct
PVETFD

SEQ ID NO: 40506 - protein, 6 aa, synthetic construct
PVETFE

SEQ ID NO: 40507 - protein, 6 aa, synthetic construct
PVETFF

SEQ ID NO: 40508 - protein, 6 aa, synthetic construct
PVETFW

SEQ ID NO: 40509 - protein, 6 aa, synthetic construct
PVETFY

SEQ ID NO: 40510 - protein, 6 aa, synthetic construct
PVETPD

SEQ ID NO: 40511 - protein, 6 aa, synthetic construct
PVETPE

SEQ ID NO: 40512 - protein, 6 aa, synthetic construct
PVETPF

SEQ ID NO: 40513 - protein, 6 aa, synthetic construct
PVETPW

SEQ ID NO: 40514 - protein, 6 aa, synthetic construct
PVETPY

SEQ ID NO: 40515 - protein, 6 aa, synthetic construct
PVETSD

SEQ ID NO: 40516 - protein, 6 aa, synthetic construct
PVETSE

SEQ ID NO: 40517 - protein, 6 aa, synthetic construct
PVETSF

SEQ ID NO: 40518 - protein, 6 aa, synthetic construct
PVETSW

SEQ ID NO: 40519 - protein, 6 aa, synthetic construct
PVETSY

SEQ ID NO: 40520 - protein, 6 aa, synthetic construct
PVETTD

SEQ ID NO: 40521 - protein, 6 aa, synthetic construct
PVETTE

SEQ ID NO: 40522 - protein, 6 aa, synthetic construct
PVETTF

SEQ ID NO: 40523 - protein, 6 aa, synthetic construct
PVETTW

SEQ ID NO: 40524 - protein, 6 aa, synthetic construct
PVETTY

SEQ ID NO: 40525 - protein, 6 aa, synthetic construct
PVETWD

SEQ ID NO: 40526 - protein, 6 aa, synthetic construct
PVETWE

SEQ ID NO: 40527 - protein, 6 aa, synthetic construct
PVETWF

SEQ ID NO: 40528 - protein, 6 aa, synthetic construct
PVETWW

SEQ ID NO: 40529 - protein, 6 aa, synthetic construct
PVETWY

SEQ ID NO: 40530 - protein, 6 aa, synthetic construct
PVETYD

SEQ ID NO: 40531 - protein, 6 aa, synthetic construct
PVETYE

SEQ ID NO: 40532 - protein, 6 aa, synthetic construct
PVETYF

SEQ ID NO: 40533 - protein, 6 aa, synthetic construct
PVETYW

SEQ ID NO: 40534 - protein, 6 aa, synthetic construct
PVETYY

SEQ ID NO: 40535 - protein, 6 aa, synthetic construct
PVETVD

SEQ ID NO: 40536 - protein, 6 aa, synthetic construct
PVETVE

SEQ ID NO: 40537 - protein, 6 aa, synthetic construct
PVETVF

SEQ ID NO: 40538 - protein, 6 aa, synthetic construct
PVETVW

SEQ ID NO: 40539 - protein, 6 aa, synthetic construct
PVETVY

SEQ ID NO: 40540 - protein, 6 aa, synthetic construct
PVEWAD

SEQ ID NO: 40541 - protein, 6 aa, synthetic construct
PVEWAE

SEQ ID NO: 40542 - protein, 6 aa, synthetic construct
PVEWAF

SEQ ID NO: 40543 - protein, 6 aa, synthetic construct
PVEWAW

SEQ ID NO: 40544 - protein, 6 aa, synthetic construct
PVEWAY

SEQ ID NO: 40545 - protein, 6 aa, synthetic construct
PVEWRD

SEQ ID NO: 40546 - protein, 6 aa, synthetic construct
PVEWRE

SEQ ID NO: 40547 - protein, 6 aa, synthetic construct
PVEWRF

SEQ ID NO: 40548 - protein, 6 aa, synthetic construct
PVEWRW

SEQ ID NO: 40549 - protein, 6 aa, synthetic construct
PVEWRY

SEQ ID NO: 40550 - protein, 6 aa, synthetic construct
PVEWND

SEQ ID NO: 40551 - protein, 6 aa, synthetic construct
PVEWNE

SEQ ID NO: 40552 - protein, 6 aa, synthetic construct
PVEWNF

SEQ ID NO: 40553 - protein, 6 aa, synthetic construct
PVEWNW

SEQ ID NO: 40554 - protein, 6 aa, synthetic construct
PVEWNY

SEQ ID NO: 40555 - protein, 6 aa, synthetic construct
PVEWDD

SEQ ID NO: 40556 - protein, 6 aa, synthetic construct
PVEWDE

SEQ ID NO: 40557 - protein, 6 aa, synthetic construct
PVEWDF

SEQ ID NO: 40558 - protein, 6 aa, synthetic construct
PVEWDW

SEQ ID NO: 40559 - protein, 6 aa, synthetic construct
PVEWDY

SEQ ID NO: 40560 - protein, 6 aa, synthetic construct
PVEWCD

SEQ ID NO: 40561 - protein, 6 aa, synthetic construct
PVEWCE

SEQ ID NO: 40562 - protein, 6 aa, synthetic construct
PVEWCF

SEQ ID NO: 40563 - protein, 6 aa, synthetic construct
PVEWCW

SEQ ID NO: 40564 - protein, 6 aa, synthetic construct
PVEWCY

SEQ ID NO: 40565 - protein, 6 aa, synthetic construct
PVEWQD

SEQ ID NO: 40566 - protein, 6 aa, synthetic construct
PVEWQE

SEQ ID NO: 40567 - protein, 6 aa, synthetic construct
PVEWQF

SEQ ID NO: 40568 - protein, 6 aa, synthetic construct
PVEWQW

SEQ ID NO: 40569 - protein, 6 aa, synthetic construct
PVEWQY

SEQ ID NO: 40570 - protein, 6 aa, synthetic construct
PVEWED

SEQ ID NO: 40571 - protein, 6 aa, synthetic construct
PVEWEE

SEQ ID NO: 40572 - protein, 6 aa, synthetic construct
PVEWEF

SEQ ID NO: 40573 - protein, 6 aa, synthetic construct
PVEWEW

SEQ ID NO: 40574 - protein, 6 aa, synthetic construct
PVEWEY

SEQ ID NO: 40575 - protein, 6 aa, synthetic construct
PVEWGD

SEQ ID NO: 40576 - protein, 6 aa, synthetic construct
PVEWGE

SEQ ID NO: 40577 - protein, 6 aa, synthetic construct
PVEWGF

SEQ ID NO: 40578 - protein, 6 aa, synthetic construct
PVEWGW

SEQ ID NO: 40579 - protein, 6 aa, synthetic construct
PVEWGY

SEQ ID NO: 40580 - protein, 6 aa, synthetic construct
PVEWHD

SEQ ID NO: 40581 - protein, 6 aa, synthetic construct
PVEWHE

SEQ ID NO: 40582 - protein, 6 aa, synthetic construct
PVEWHF

SEQ ID NO: 40583 - protein, 6 aa, synthetic construct
PVEWHW

SEQ ID NO: 40584 - protein, 6 aa, synthetic construct
PVEWHY

SEQ ID NO: 40585 - protein, 6 aa, synthetic construct
PVEWID

SEQ ID NO: 40586 - protein, 6 aa, synthetic construct
PVEWIE

SEQ ID NO: 40587 - protein, 6 aa, synthetic construct
PVEWIF

SEQ ID NO: 40588 - protein, 6 aa, synthetic construct
PVEWIW

SEQ ID NO: 40589 - protein, 6 aa, synthetic construct
PVEWIY

SEQ ID NO: 40590 - protein, 6 aa, synthetic construct
PVEWLD

SEQ ID NO: 40591 - protein, 6 aa, synthetic construct
PVEWLE

SEQ ID NO: 40592 - protein, 6 aa, synthetic construct
PVEWLF

SEQ ID NO: 40593 - protein, 6 aa, synthetic construct
PVEWLW

SEQ ID NO: 40594 - protein, 6 aa, synthetic construct
PVEWLY

SEQ ID NO: 40595 - protein, 6 aa, synthetic construct
PVEWKD

SEQ ID NO: 40596 - protein, 6 aa, synthetic construct
PVEWKE

SEQ ID NO: 40597 - protein, 6 aa, synthetic construct
PVEWKF

SEQ ID NO: 40598 - protein, 6 aa, synthetic construct
PVEWKW

SEQ ID NO: 40599 - protein, 6 aa, synthetic construct
PVEWKY

SEQ ID NO: 40600 - protein, 6 aa, synthetic construct
PVEWMD

SEQ ID NO: 40601 - protein, 6 aa, synthetic construct
PVEWME

SEQ ID NO: 40602 - protein, 6 aa, synthetic construct
PVEWMF

SEQ ID NO: 40603 - protein, 6 aa, synthetic construct
PVEWMW

SEQ ID NO: 40604 - protein, 6 aa, synthetic construct
PVEWMY

SEQ ID NO: 40605 - protein, 6 aa, synthetic construct
PVEWFD

SEQ ID NO: 40606 - protein, 6 aa, synthetic construct
PVEWFE

SEQ ID NO: 40607 - protein, 6 aa, synthetic construct
PVEWFF

SEQ ID NO: 40608 - protein, 6 aa, synthetic construct
PVEWFW

SEQ ID NO: 40609 - protein, 6 aa, synthetic construct
PVEWFY

SEQ ID NO: 40610 - protein, 6 aa, synthetic construct
PVEWPD

SEQ ID NO: 40611 - protein, 6 aa, synthetic construct
PVEWPE

SEQ ID NO: 40612 - protein, 6 aa, synthetic construct
PVEWPF

SEQ ID NO: 40613 - protein, 6 aa, synthetic construct
PVEWPW

SEQ ID NO: 40614 - protein, 6 aa, synthetic construct
PVEWPY

SEQ ID NO: 40615 - protein, 6 aa, synthetic construct
PVEWSD

SEQ ID NO: 40616 - protein, 6 aa, synthetic construct
PVEWSE

SEQ ID NO: 40617 - protein, 6 aa, synthetic construct
PVEWSF

SEQ ID NO: 40618 - protein, 6 aa, synthetic construct
PVEWSW

SEQ ID NO: 40619 - protein, 6 aa, synthetic construct
PVEWSY

SEQ ID NO: 40620 - protein, 6 aa, synthetic construct
PVEWTD

SEQ ID NO: 40621 - protein, 6 aa, synthetic construct
PVEWTE

SEQ ID NO: 40622 - protein, 6 aa, synthetic construct
PVEWTF

SEQ ID NO: 40623 - protein, 6 aa, synthetic construct
PVEWTW

SEQ ID NO: 40624 - protein, 6 aa, synthetic construct
PVEWTY

SEQ ID NO: 40625 - protein, 6 aa, synthetic construct
PVEWWD

SEQ ID NO: 40626 - protein, 6 aa, synthetic construct
PVEWWE

SEQ ID NO: 40627 - protein, 6 aa, synthetic construct
PVEWWF

SEQ ID NO: 40628 - protein, 6 aa, synthetic construct
PVEWWW

SEQ ID NO: 40629 - protein, 6 aa, synthetic construct
PVEWWY

SEQ ID NO: 40630 - protein, 6 aa, synthetic construct
PVEWYD

SEQ ID NO: 40631 - protein, 6 aa, synthetic construct
PVEWYE

SEQ ID NO: 40632 - protein, 6 aa, synthetic construct
PVEWYF

SEQ ID NO: 40633 - protein, 6 aa, synthetic construct
PVEWYW

SEQ ID NO: 40634 - protein, 6 aa, synthetic construct
PVEWYY

SEQ ID NO: 40635 - protein, 6 aa, synthetic construct
PVEWVD

SEQ ID NO: 40636 - protein, 6 aa, synthetic construct
PVEWVE

SEQ ID NO: 40637 - protein, 6 aa, synthetic construct
PVEWVF

SEQ ID NO: 40638 - protein, 6 aa, synthetic construct
PVEWVW

SEQ ID NO: 40639 - protein, 6 aa, synthetic construct
PVEWVY

SEQ ID NO: 40640 - protein, 6 aa, synthetic construct
PVEYAD

SEQ ID NO: 40641 - protein, 6 aa, synthetic construct
PVEYAE

SEQ ID NO: 40642 - protein, 6 aa, synthetic construct
PVEYAF

SEQ ID NO: 40643 - protein, 6 aa, synthetic construct
PVEYAW

SEQ ID NO: 40644 - protein, 6 aa, synthetic construct
PVEYAY

SEQ ID NO: 40645 - protein, 6 aa, synthetic construct
PVEYRD

SEQ ID NO: 40646 - protein, 6 aa, synthetic construct
PVEYRE

SEQ ID NO: 40647 - protein, 6 aa, synthetic construct
PVEYRF

SEQ ID NO: 40648 - protein, 6 aa, synthetic construct
PVEYRW

SEQ ID NO: 40649 - protein, 6 aa, synthetic construct
PVEYRY

SEQ ID NO: 40650 - protein, 6 aa, synthetic construct
PVEYND

SEQ ID NO: 40651 - protein, 6 aa, synthetic construct
PVEYNE

SEQ ID NO: 40652 - protein, 6 aa, synthetic construct
PVEYNF

SEQ ID NO: 40653 - protein, 6 aa, synthetic construct
PVEYNW

SEQ ID NO: 40654 - protein, 6 aa, synthetic construct
PVEYNY

SEQ ID NO: 40655 - protein, 6 aa, synthetic construct
PVEYDD

SEQ ID NO: 40656 - protein, 6 aa, synthetic construct
PVEYDE

SEQ ID NO: 40657 - protein, 6 aa, synthetic construct
PVEYDF

SEQ ID NO: 40658 - protein, 6 aa, synthetic construct
PVEYDW

SEQ ID NO: 40659 - protein, 6 aa, synthetic construct
PVEYDY

SEQ ID NO: 40660 - protein, 6 aa, synthetic construct
PVEYCD

SEQ ID NO: 40661 - protein, 6 aa, synthetic construct
PVEYCE

SEQ ID NO: 40662 - protein, 6 aa, synthetic construct
PVEYCF

SEQ ID NO: 40663 - protein, 6 aa, synthetic construct
PVEYCW

SEQ ID NO: 40664 - protein, 6 aa, synthetic construct
PVEYCY

SEQ ID NO: 40665 - protein, 6 aa, synthetic construct
PVEYQD

SEQ ID NO: 40666 - protein, 6 aa, synthetic construct
PVEYQE

SEQ ID NO: 40667 - protein, 6 aa, synthetic construct
PVEYQF

SEQ ID NO: 40668 - protein, 6 aa, synthetic construct
PVEYQW

SEQ ID NO: 40669 - protein, 6 aa, synthetic construct
PVEYQY

SEQ ID NO: 40670 - protein, 6 aa, synthetic construct
PVEYED

SEQ ID NO: 40671 - protein, 6 aa, synthetic construct
PVEYEE

SEQ ID NO: 40672 - protein, 6 aa, synthetic construct
PVEYEF

SEQ ID NO: 40673 - protein, 6 aa, synthetic construct
PVEYEW

SEQ ID NO: 40674 - protein, 6 aa, synthetic construct
PVEYEY

SEQ ID NO: 40675 - protein, 6 aa, synthetic construct
PVEYGD

SEQ ID NO: 40676 - protein, 6 aa, synthetic construct
PVEYGE

SEQ ID NO: 40677 - protein, 6 aa, synthetic construct
PVEYGF

SEQ ID NO: 40678 - protein, 6 aa, synthetic construct
PVEYGW

SEQ ID NO: 40679 - protein, 6 aa, synthetic construct
PVEYGY

SEQ ID NO: 40680 - protein, 6 aa, synthetic construct
PVEYHD

SEQ ID NO: 40681 - protein, 6 aa, synthetic construct
PVEYHE

SEQ ID NO: 40682 - protein, 6 aa, synthetic construct
PVEYHF

SEQ ID NO: 40683 - protein, 6 aa, synthetic construct
PVEYHW

SEQ ID NO: 40684 - protein, 6 aa, synthetic construct
PVEYHY

SEQ ID NO: 40685 - protein, 6 aa, synthetic construct
PVEYID

SEQ ID NO: 40686 - protein, 6 aa, synthetic construct
PVEYIE

SEQ ID NO: 40687 - protein, 6 aa, synthetic construct
PVEYIF

SEQ ID NO: 40688 - protein, 6 aa, synthetic construct
PVEYIW

SEQ ID NO: 40689 - protein, 6 aa, synthetic construct
PVEYIY

SEQ ID NO: 40690 - protein, 6 aa, synthetic construct
PVEYLD

SEQ ID NO: 40691 - protein, 6 aa, synthetic construct
PVEYLE

SEQ ID NO: 40692 - protein, 6 aa, synthetic construct
PVEYLF

SEQ ID NO: 40693 - protein, 6 aa, synthetic construct
PVEYLW

SEQ ID NO: 40694 - protein, 6 aa, synthetic construct
PVEYLY

SEQ ID NO: 40695 - protein, 6 aa, synthetic construct
PVEYKD

SEQ ID NO: 40696 - protein, 6 aa, synthetic construct
PVEYKE

SEQ ID NO: 40697 - protein, 6 aa, synthetic construct
PVEYKF

SEQ ID NO: 40698 - protein, 6 aa, synthetic construct
PVEYKW

SEQ ID NO: 40699 - protein, 6 aa, synthetic construct
PVEYKY

SEQ ID NO: 40700 - protein, 6 aa, synthetic construct
PVEYMD

SEQ ID NO: 40701 - protein, 6 aa, synthetic construct
PVEYME

SEQ ID NO: 40702 - protein, 6 aa, synthetic construct
PVEYMF

SEQ ID NO: 40703 - protein, 6 aa, synthetic construct
PVEYMW

SEQ ID NO: 40704 - protein, 6 aa, synthetic construct
PVEYMY

SEQ ID NO: 40705 - protein, 6 aa, synthetic construct
PVEYFD

SEQ ID NO: 40706 - protein, 6 aa, synthetic construct
PVEYFE

SEQ ID NO: 40707 - protein, 6 aa, synthetic construct
PVEYFF

SEQ ID NO: 40708 - protein, 6 aa, synthetic construct
PVEYFW

SEQ ID NO: 40709 - protein, 6 aa, synthetic construct
PVEYFY

SEQ ID NO: 40710 - protein, 6 aa, synthetic construct
PVEYPD

SEQ ID NO: 40711 - protein, 6 aa, synthetic construct
PVEYPE

SEQ ID NO: 40712 - protein, 6 aa, synthetic construct
PVEYPF

SEQ ID NO: 40713 - protein, 6 aa, synthetic construct
PVEYPW

SEQ ID NO: 40714 - protein, 6 aa, synthetic construct
PVEYPY

SEQ ID NO: 40715 - protein, 6 aa, synthetic construct
PVEYSD

SEQ ID NO: 40716 - protein, 6 aa, synthetic construct
PVEYSE

SEQ ID NO: 40717 - protein, 6 aa, synthetic construct
PVEYSF

SEQ ID NO: 40718 - protein, 6 aa, synthetic construct
PVEYSW

SEQ ID NO: 40719 - protein, 6 aa, synthetic construct
PVEYSY

SEQ ID NO: 40720 - protein, 6 aa, synthetic construct
PVEYTD

SEQ ID NO: 40721 - protein, 6 aa, synthetic construct
PVEYTE

SEQ ID NO: 40722 - protein, 6 aa, synthetic construct
PVEYTF

SEQ ID NO: 40723 - protein, 6 aa, synthetic construct
PVEYTW

SEQ ID NO: 40724 - protein, 6 aa, synthetic construct
PVEYTY

SEQ ID NO: 40725 - protein, 6 aa, synthetic construct
PVEYWD

SEQ ID NO: 40726 - protein, 6 aa, synthetic construct
PVEYWE

SEQ ID NO: 40727 - protein, 6 aa, synthetic construct
PVEYWF

SEQ ID NO: 40728 - protein, 6 aa, synthetic construct
PVEYWW

SEQ ID NO: 40729 - protein, 6 aa, synthetic construct
PVEYWY

SEQ ID NO: 40730 - protein, 6 aa, synthetic construct
PVEYYD

SEQ ID NO: 40731 - protein, 6 aa, synthetic construct
PVEYYE

SEQ ID NO: 40732 - protein, 6 aa, synthetic construct
PVEYYF

SEQ ID NO: 40733 - protein, 6 aa, synthetic construct
PVEYYW

SEQ ID NO: 40734 - protein, 6 aa, synthetic construct
PVEYYY

SEQ ID NO: 40735 - protein, 6 aa, synthetic construct
PVEYVD

SEQ ID NO: 40736 - protein, 6 aa, synthetic construct
PVEYVE

SEQ ID NO: 40737 - protein, 6 aa, synthetic construct
PVEYVF

SEQ ID NO: 40738 - protein, 6 aa, synthetic construct
PVEYVW

SEQ ID NO: 40739 - protein, 6 aa, synthetic construct
PVEYVY

SEQ ID NO: 40740 - protein, 6 aa, synthetic construct
PVEVAD

SEQ ID NO: 40741 - protein, 6 aa, synthetic construct
PVEVAE

SEQ ID NO: 40742 - protein, 6 aa, synthetic construct
PVEVAF

SEQ ID NO: 40743 - protein, 6 aa, synthetic construct
PVEVAW

SEQ ID NO: 40744 - protein, 6 aa, synthetic construct
PVEVAY

SEQ ID NO: 40745 - protein, 6 aa, synthetic construct
PVEVRD

SEQ ID NO: 40746 - protein, 6 aa, synthetic construct
PVEVRE

SEQ ID NO: 40747 - protein, 6 aa, synthetic construct
PVEVRF

SEQ ID NO: 40748 - protein, 6 aa, synthetic construct
PVEVRW

SEQ ID NO: 40749 - protein, 6 aa, synthetic construct
PVEVRY

SEQ ID NO: 40750 - protein, 6 aa, synthetic construct
PVEVND

SEQ ID NO: 40751 - protein, 6 aa, synthetic construct
PVEVNE

SEQ ID NO: 40752 - protein, 6 aa, synthetic construct
PVEVNF

SEQ ID NO: 40753 - protein, 6 aa, synthetic construct
PVEVNW

SEQ ID NO: 40754 - protein, 6 aa, synthetic construct
PVEVNY

SEQ ID NO: 40755 - protein, 6 aa, synthetic construct
PVEVDD

SEQ ID NO: 40756 - protein, 6 aa, synthetic construct
PVEVDE

SEQ ID NO: 40757 - protein, 6 aa, synthetic construct
PVEVDF

SEQ ID NO: 40758 - protein, 6 aa, synthetic construct
PVEVDW

SEQ ID NO: 40759 - protein, 6 aa, synthetic construct
PVEVDY

SEQ ID NO: 40760 - protein, 6 aa, synthetic construct
PVEVCD

SEQ ID NO: 40761 - protein, 6 aa, synthetic construct
PVEVCE

SEQ ID NO: 40762 - protein, 6 aa, synthetic construct
PVEVCF

SEQ ID NO: 40763 - protein, 6 aa, synthetic construct
PVEVCW

SEQ ID NO: 40764 - protein, 6 aa, synthetic construct
PVEVCY

SEQ ID NO: 40765 - protein, 6 aa, synthetic construct
PVEVQD

SEQ ID NO: 40766 - protein, 6 aa, synthetic construct
PVEVQE

SEQ ID NO: 40767 - protein, 6 aa, synthetic construct
PVEVQF

SEQ ID NO: 40768 - protein, 6 aa, synthetic construct
PVEVQW

SEQ ID NO: 40769 - protein, 6 aa, synthetic construct
PVEVQY

SEQ ID NO: 40770 - protein, 6 aa, synthetic construct
PVEVED

SEQ ID NO: 40771 - protein, 6 aa, synthetic construct
PVEVEE

SEQ ID NO: 40772 - protein, 6 aa, synthetic construct
PVEVEF

SEQ ID NO: 40773 - protein, 6 aa, synthetic construct
PVEVEW

SEQ ID NO: 40774 - protein, 6 aa, synthetic construct
PVEVEY

SEQ ID NO: 40775 - protein, 6 aa, synthetic construct
PVEVGD

SEQ ID NO: 40776 - protein, 6 aa, synthetic construct
PVEVGE

SEQ ID NO: 40777 - protein, 6 aa, synthetic construct
PVEVGF

SEQ ID NO: 40778 - protein, 6 aa, synthetic construct
PVEVGW

SEQ ID NO: 40779 - protein, 6 aa, synthetic construct
PVEVGY

SEQ ID NO: 40780 - protein, 6 aa, synthetic construct
PVEVHD

SEQ ID NO: 40781 - protein, 6 aa, synthetic construct
PVEVHE

SEQ ID NO: 40782 - protein, 6 aa, synthetic construct
PVEVHF

SEQ ID NO: 40783 - protein, 6 aa, synthetic construct
PVEVHW

SEQ ID NO: 40784 - protein, 6 aa, synthetic construct
PVEVHY

SEQ ID NO: 40785 - protein, 6 aa, synthetic construct
PVEVID

SEQ ID NO: 40786 - protein, 6 aa, synthetic construct
PVEVIE

SEQ ID NO: 40787 - protein, 6 aa, synthetic construct
PVEVIF

SEQ ID NO: 40788 - protein, 6 aa, synthetic construct
PVEVIW

SEQ ID NO: 40789 - protein, 6 aa, synthetic construct
PVEVIY

SEQ ID NO: 40790 - protein, 6 aa, synthetic construct
PVEVLD

SEQ ID NO: 40791 - protein, 6 aa, synthetic construct
PVEVLE

SEQ ID NO: 40792 - protein, 6 aa, synthetic construct
PVEVLF

SEQ ID NO: 40793 - protein, 6 aa, synthetic construct
PVEVLW

SEQ ID NO: 40794 - protein, 6 aa, synthetic construct
PVEVLY

SEQ ID NO: 40795 - protein, 6 aa, synthetic construct
PVEVKD

SEQ ID NO: 40796 - protein, 6 aa, synthetic construct
PVEVKE

SEQ ID NO: 40797 - protein, 6 aa, synthetic construct
PVEVKF

SEQ ID NO: 40798 - protein, 6 aa, synthetic construct
PVEVKW

SEQ ID NO: 40799 - protein, 6 aa, synthetic construct
PVEVKY

SEQ ID NO: 40800 - protein, 6 aa, synthetic construct
PVEVMD

SEQ ID NO: 40801 - protein, 6 aa, synthetic construct
PVEVME

SEQ ID NO: 40802 - protein, 6 aa, synthetic construct
PVEVMF

SEQ ID NO: 40803 - protein, 6 aa, synthetic construct
PVEVMW

SEQ ID NO: 40804 - protein, 6 aa, synthetic construct
PVEVMY

SEQ ID NO: 40805 - protein, 6 aa, synthetic construct
PVEVFD

SEQ ID NO: 40806 - protein, 6 aa, synthetic construct
PVEVFE

SEQ ID NO: 40807 - protein, 6 aa, synthetic construct
PVEVFF

SEQ ID NO: 40808 - protein, 6 aa, synthetic construct
PVEVFW

SEQ ID NO: 40809 - protein, 6 aa, synthetic construct
PVEVFY

SEQ ID NO: 40810 - protein, 6 aa, synthetic construct
PVEVPD

SEQ ID NO: 40811 - protein, 6 aa, synthetic construct
PVEVPE

SEQ ID NO: 40812 - protein, 6 aa, synthetic construct
PVEVPF

SEQ ID NO: 40813 - protein, 6 aa, synthetic construct
PVEVPW

SEQ ID NO: 40814 - protein, 6 aa, synthetic construct
PVEVPY

SEQ ID NO: 40815 - protein, 6 aa, synthetic construct
PVEVSD

SEQ ID NO: 40816 - protein, 6 aa, synthetic construct
PVEVSE

SEQ ID NO: 40817 - protein, 6 aa, synthetic construct
PVEVSF

SEQ ID NO: 40818 - protein, 6 aa, synthetic construct
PVEVSW

SEQ ID NO: 40819 - protein, 6 aa, synthetic construct
PVEVSY

SEQ ID NO: 40820 - protein, 6 aa, synthetic construct
PVEVTD

SEQ ID NO: 40821 - protein, 6 aa, synthetic construct
PVEVTE

SEQ ID NO: 40822 - protein, 6 aa, synthetic construct
PVEVTF

SEQ ID NO: 40823 - protein, 6 aa, synthetic construct
PVEVTW

SEQ ID NO: 40824 - protein, 6 aa, synthetic construct
PVEVTY

SEQ ID NO: 40825 - protein, 6 aa, synthetic construct
PVEVWD

SEQ ID NO: 40826 - protein, 6 aa, synthetic construct
PVEVWE

SEQ ID NO: 40827 - protein, 6 aa, synthetic construct
PVEVWF

SEQ ID NO: 40828 - protein, 6 aa, synthetic construct
PVEVWW

SEQ ID NO: 40829 - protein, 6 aa, synthetic construct
PVEVWY

SEQ ID NO: 40830 - protein, 6 aa, synthetic construct
PVEVYD

SEQ ID NO: 40831 - protein, 6 aa, synthetic construct
PVEVYE

SEQ ID NO: 40832 - protein, 6 aa, synthetic construct
PVEVYF

SEQ ID NO: 40833 - protein, 6 aa, synthetic construct
PVEVYW

SEQ ID NO: 40834 - protein, 6 aa, synthetic construct
PVEVYY

SEQ ID NO: 40835 - protein, 6 aa, synthetic construct
PVEVVD

SEQ ID NO: 40836 - protein, 6 aa, synthetic construct
PVEVVE

SEQ ID NO: 40837 - protein, 6 aa, synthetic construct
PVEVVF

SEQ ID NO: 40838 - protein, 6 aa, synthetic construct
PVEVVW

SEQ ID NO: 40839 - protein, 6 aa, synthetic construct
PVEVVY

SEQ ID NO: 40840 - protein, 9 aa, synthetic construct
NYPPEESDW

SEQ ID NO: 40841 - protein, 9 aa, synthetic construct
FNVPVESDW

SEQ ID NO: 40842 - protein, 9 aa, synthetic construct
MNFPEENDW

SEQ ID NO: 40843 - protein, 9 aa, synthetic construct
VNYPTETDW

SEQ ID NO: 40844 - protein, 9 aa, synthetic construct
HNVPVESDW

SEQ ID NO: 40845 - protein, 9 aa, synthetic construct
INIPGESDW

SEQ ID NO: 40846 - protein, 9 aa, synthetic construct
NNAPTENEW

SEQ ID NO: 40847 - protein, 9 aa, synthetic construct
VNEPIESYW

SEQ ID NO: 40848 - protein, 9 aa, synthetic construct
KNDPVEDSW

SEQ ID NO: 40849 - protein, 9 aa, synthetic construct
YNAPTENEC

SEQ ID NO: 40850 - protein, 9 aa, synthetic construct
LNLPEENNW

SEQ ID NO: 40851 - protein, 9 aa, synthetic construct
LNLPEESLW

SEQ ID NO: 40852 - protein, 9 aa, synthetic construct
MNFPEESDW

SEQ ID NO: 40853 - protein, 9 aa, synthetic construct
FNMPEESHW

SEQ ID NO: 40854 - protein, 9 aa, synthetic construct
LNLPEESDW

SEQ ID NO: 40855 - protein, 9 aa, synthetic construct
FNAPTENEW

SEQ ID NO: 40856 - protein, 9 aa, synthetic construct
VLSPEESDW

SEQ ID NO: 40857 - protein, 9 aa, synthetic construct
GNQPVENEW

SEQ ID NO: 40858 - protein, 9 aa, synthetic construct
IHLPEETTW

SEQ ID NO: 40859 - protein, 9 aa, synthetic construct
YNAPTENHW

SEQ ID NO: 40860 - protein, 9 aa, synthetic construct
KNQPTESYW

SEQ ID NO: 40861 - protein, 9 aa, synthetic construct
QNFPEESSW

SEQ ID NO: 40862 - protein, 9 aa, synthetic construct
VNYPTENEW

SEQ ID NO: 40863 - protein, 9 aa, synthetic construct
WNMPIEMDW

SEQ ID NO: 40864 - protein, 9 aa, synthetic construct
RNLPVESNW

SEQ ID NO: 40865 - protein, 9 aa, synthetic construct
WRIPEESTW

SEQ ID NO: 40866 - protein, 9 aa, synthetic construct
SGDPVESDW

SEQ ID NO: 40867 - protein, 9 aa, synthetic construct
LNTPSETDW

SEQ ID NO: 40868 - protein, 9 aa, synthetic construct
RNWPTETDW

SEQ ID NO: 40869 - protein, 9 aa, synthetic construct
WNFPEENTW

SEQ ID NO: 40870 - protein, 9 aa, synthetic construct
LQLPEENEW

SEQ ID NO: 40871 - protein, 9 aa, synthetic construct
RTFPEENDW

SEQ ID NO: 40872 - protein, 9 aa, synthetic construct
GNQPEENDW

SEQ ID NO: 40873 - protein, 9 aa, synthetic construct
HSWPEENDW

SEQ ID NO: 40874 - protein, 9 aa, synthetic construct
RNLPSESTW

SEQ ID NO: 40875 - protein, 9 aa, synthetic construct
YNVPEENDW

SEQ ID NO: 40876 - protein, 9 aa, synthetic construct
FNQPAEDTW

SEQ ID NO: 40877 - protein, 9 aa, synthetic construct
SNVPEENQW

SEQ ID NO: 40878 - protein, 9 aa, synthetic construct
FNAPTENDW

SEQ ID NO: 40879 - protein, 9 aa, synthetic construct
MNYPEENTY

SEQ ID NO: 40880 - protein, 9 aa, synthetic construct
LNLPEENEW

SEQ ID NO: 40881 - protein, 9 aa, synthetic construct
MNAPVESDW

SEQ ID NO: 40882 - protein, 9 aa, synthetic construct
INIPQESTW

SEQ ID NO: 40883 - protein, 9 aa, synthetic construct
HNLPEESDW

SEQ ID NO: 40884 - protein, 9 aa, synthetic construct
LNLPEESGW

SEQ ID NO: 40885 - protein, 9 aa, synthetic construct
YNAPTENDW

SEQ ID NO: 40886 - protein, 9 aa, synthetic construct
RNFPEESQW

SEQ ID NO: 40887 - protein, 9 aa, synthetic construct
RQTPQENDW

SEQ ID NO: 40888 - protein, 9 aa, synthetic construct
LNLPEETTW

SEQ ID NO: 40889 - protein, 9 aa, synthetic construct
LNLPEESTW

SEQ ID NO: 40890 - protein, 9 aa, synthetic construct
YNQPIESTW

SEQ ID NO: 40891 - protein, 9 aa, synthetic construct
KNIPMESSW

SEQ ID NO: 40892 - protein, 9 aa, synthetic construct
HNIPTETSW

SEQ ID NO: 40893 - protein, 9 aa, synthetic construct
PNLPTETEW

SEQ ID NO: 40894 - protein, 9 aa, synthetic construct
TNWPEESDW

SEQ ID NO: 40895 - protein, 9 aa, synthetic construct
LNMPEESDW

SEQ ID NO: 40896 - protein, 9 aa, synthetic construct
LQLPEENDW

SEQ ID NO: 40897 - protein, 9 aa, synthetic construct
LNSPEESSW

SEQ ID NO: 40898 - protein, 9 aa, synthetic construct
SNSPAENTW

SEQ ID NO: 40899 - protein, 9 aa, synthetic construct
TNWPEENDW

SEQ ID NO: 40900 - protein, 9 aa, synthetic construct
GNWPEESNW

SEQ ID NO: 40901 - protein, 9 aa, synthetic construct
HSWPEENEW

SEQ ID NO: 40902 - protein, 9 aa, synthetic construct
YNLPEESDW

SEQ ID NO: 40903 - protein, 9 aa, synthetic construct
QNLPTESNW

SEQ ID NO: 40904 - protein, 9 aa, synthetic construct
HNRPEENTW

SEQ ID NO: 40905 - protein, 9 aa, synthetic construct
QNYPVENTW

SEQ ID NO: 40906 - protein, 9 aa, synthetic construct
YQVPVENEW

SEQ ID NO: 40907 - protein, 9 aa, synthetic construct
LNLPEESYW

SEQ ID NO: 40908 - protein, 9 aa, synthetic construct
RNMPIEDYW

SEQ ID NO: 40909 - protein, 9 aa, synthetic construct
TNWPEEIDF

SEQ ID NO: 40910 - protein, 9 aa, synthetic construct
KSIPQENDW

SEQ ID NO: 40911 - protein, 9 aa, synthetic construct
LFLPEESDW

SEQ ID NO: 40912 - protein, 9 aa, synthetic construct
MNTPEESQW

SEQ ID NO: 40913 - protein, 9 aa, synthetic construct
FNLPSESDW

SEQ ID NO: 40914 - protein, 9 aa, synthetic construct
TNCPEENDW

SEQ ID NO: 40915 - protein, 9 aa, synthetic construct
DNVPEENLW

SEQ ID NO: 40916 - protein, 9 aa, synthetic construct
NNVPEENHW

SEQ ID NO: 40917 - protein, 9 aa, synthetic construct
LQLPEESYW

SEQ ID NO: 40918 - protein, 9 aa, synthetic construct
VNEPSESNW

SEQ ID NO: 40919 - protein, 9 aa, synthetic construct
FLFPEESDW

SEQ ID NO: 40920 - protein, 9 aa, synthetic construct
TNYPEEADW

SEQ ID NO: 40921 - protein, 9 aa, synthetic construct
MNLPMEDTW

SEQ ID NO: 40922 - protein, 9 aa, synthetic construct
KNFPTETTW

SEQ ID NO: 40923 - protein, 9 aa, synthetic construct
LNLPDESDW

SEQ ID NO: 40924 - protein, 9 aa, synthetic construct
YNAPEENEW

SEQ ID NO: 40925 - protein, 9 aa, synthetic construct
KQEPQEIDI

SEQ ID NO: 40926 - protein, 9 aa, synthetic construct
LNWPEENDW

SEQ ID NO: 40927 - protein, 9 aa, synthetic construct
TRQPEENDW

SEQ ID NO: 40928 - protein, 9 aa, synthetic construct
YNAPTENQW

SEQ ID NO: 40929 - protein, 9 aa, synthetic construct
YNVPVESDW

SEQ ID NO: 40930 - protein, 9 aa, synthetic construct
RSTPEESYW

SEQ ID NO: 40931 - protein, 9 aa, synthetic construct
GNQPVENDW

SEQ ID NO: 40932 - protein, 9 aa, synthetic construct
LNLPEENTW

SEQ ID NO: 40933 - protein, 9 aa, synthetic construct
FNLPEESDW

SEQ ID NO: 40934 - protein, 9 aa, synthetic construct
RNVPEENDW

SEQ ID NO: 40935 - protein, 9 aa, synthetic construct
VNVPVETSW

SEQ ID NO: 40936 - protein, 9 aa, synthetic construct
GSEPEENDW

SEQ ID NO: 40937 - protein, 9 aa, synthetic construct
GKYPEENDW

SEQ ID NO: 40938 - protein, 9 aa, synthetic construct
MNMPSESTW

SEQ ID NO: 40939 - protein, 9 aa, synthetic construct
LNYPEEADW

SEQ ID NO: 40940 - protein, 9 aa, synthetic construct
LQLPEEDDW

SEQ ID NO: 40941 - protein, 9 aa, synthetic construct
LNLPEESDL

SEQ ID NO: 40942 - protein, 9 aa, synthetic construct
TNWPEENTW

SEQ ID NO: 40943 - protein, 9 aa, synthetic construct
LNLPEESEW

SEQ ID NO: 40944 - protein, 9 aa, synthetic construct
LNLPEEDDW

SEQ ID NO: 40945 - protein, 9 aa, synthetic construct
MNYPEESYW

SEQ ID NO: 40946 - protein, 9 aa, synthetic construct
MNYPEESDW

SEQ ID NO: 40947 - protein, 9 aa, synthetic construct
ASCPEESDW

SEQ ID NO: 40948 - protein, 9 aa, synthetic construct
LNLPVESDW

SEQ ID NO: 40949 - protein, 9 aa, synthetic construct
LNLPEEADW

SEQ ID NO: 40950 - protein, 9 aa, synthetic construct
RNVPEESYW

SEQ ID NO: 40951 - protein, 9 aa, synthetic construct
YNAPTETDW

SEQ ID NO: 40952 - protein, 9 aa, synthetic construct
LNLPEESHW

SEQ ID NO: 40953 - protein, 9 aa, synthetic construct
YNAPTENES

SEQ ID NO: 40954 - protein, 9 aa, synthetic construct
GNTPVEVDW

SEQ ID NO: 40955 - protein, 9 aa, synthetic construct
TNLPEESDW

SEQ ID NO: 40956 - protein, 9 aa, synthetic construct
TNWPEENEW

SEQ ID NO: 40957 - protein, 9 aa, synthetic construct
YNAPTESEW

SEQ ID NO: 40958 - protein, 9 aa, synthetic construct
RNVPEESDW

SEQ ID NO: 40959 - protein, 9 aa, synthetic construct
LNLPGESDW

SEQ ID NO: 40960 - protein, 9 aa, synthetic construct
LQLPEESDW

SEQ ID NO: 40961 - protein, 9 aa, synthetic construct
LNLPEESDF

SEQ ID NO: 40962 - protein, 9 aa, synthetic construct
DRYPVEDDW

SEQ ID NO: 40963 - protein, 9 aa, synthetic construct
LNYPEESYW

SEQ ID NO: 40964 - protein, 9 aa, synthetic construct
VNSPEETEW

SEQ ID NO: 40965 - protein, 9 aa, synthetic construct
LNLPEEYDW

SEQ ID NO: 40966 - protein, 9 aa, synthetic construct
GNQPEESDW

SEQ ID NO: 40967 - protein, 9 aa, synthetic construct
YNAPTENTW

SEQ ID NO: 40968 - protein, 9 aa, synthetic construct
YNVPEESDW

SEQ ID NO: 40969 - protein, 9 aa, synthetic construct
LNTPEESMW

SEQ ID NO: 40970 - protein, 9 aa, synthetic construct
NQLPEENTY

SEQ ID NO: 40971 - protein, 9 aa, synthetic construct
TNWPVESDW

SEQ ID NO: 40972 - protein, 9 aa, synthetic construct
YNAPTENNW

SEQ ID NO: 40973 - protein, 9 aa, synthetic construct
YNAPMENEW

SEQ ID NO: 40974 - protein, 9 aa, synthetic construct
QNVPTEDTW

SEQ ID NO: 40975 - protein, 9 aa, synthetic construct
LNLPEENDW

SEQ ID NO: 40976 - protein, 9 aa, synthetic construct
LNSPEENDW

SEQ ID NO: 40977 - protein, 9 aa, synthetic construct
TNLPEENDW

SEQ ID NO: 40978 - protein, 9 aa, synthetic construct
LNYPEENDW

SEQ ID NO: 40979 - protein, 9 aa, synthetic construct
MNEPEESSW

SEQ ID NO: 40980 - protein, 9 aa, synthetic construct
LHYPVESDW

SEQ ID NO: 40981 - protein, 9 aa, synthetic construct
YQIPEESSW

SEQ ID NO: 40982 - protein, 9 aa, synthetic construct
YNAPTENER

SEQ ID NO: 40983 - protein, 9 aa, synthetic construct
INLPSESDW

SEQ ID NO: 40984 - protein, 9 aa, synthetic construct
LNFPEENNW

SEQ ID NO: 40985 - protein, 9 aa, synthetic construct
LNVPEESDW

SEQ ID NO: 40986 - protein, 9 aa, synthetic construct
LNWPEESDW

SEQ ID NO: 40987 - protein, 9 aa, synthetic construct
YNPPEENDW

SEQ ID NO: 40988 - protein, 9 aa, synthetic construct
YNAPTEMSG

SEQ ID NO: 40989 - protein, 9 aa, synthetic construct
QNLPTESDW

SEQ ID NO: 40990 - protein, 9 aa, synthetic construct
GNQPVEDEW

SEQ ID NO: 40991 - protein, 9 aa, synthetic construct
LNYPEESDW

SEQ ID NO: 40992 - protein, 9 aa, synthetic construct
YNDPTENEW

SEQ ID NO: 40993 - protein, 9 aa, synthetic construct
LNLPEETDW

SEQ ID NO: 40994 - protein, 9 aa, synthetic construct
KNTPEENTW

SEQ ID NO: 40995 - protein, 9 aa, synthetic construct
KNEPTENTW

SEQ ID NO: 40996 - protein, 9 aa, synthetic construct
INWPTENDW

SEQ ID NO: 40997 - protein, 9 aa, synthetic construct
INLPSENDW

SEQ ID NO: 40998 - protein, 9 aa, synthetic construct
LNLPEESDC

SEQ ID NO: 40999 - protein, 9 aa, synthetic construct
TNVPMEDDW

SEQ ID NO: 41000 - protein, 9 aa, synthetic construct
GNQPVEDYW

SEQ ID NO: 41001 - protein, 9 aa, synthetic construct
INLPSENEW

SEQ ID NO: 41002 - protein, 9 aa, synthetic construct
MNSPEETSW

SEQ ID NO: 41003 - protein, 9 aa, synthetic construct
LNTPIETEW

SEQ ID NO: 41004 - protein, 9 aa, synthetic construct
SNWPEENDW

SEQ ID NO: 41005 - protein, 9 aa, synthetic construct
MNEPVESNW

SEQ ID NO: 41006 - protein, 9 aa, synthetic construct
FLEPQEIDF

SEQ ID NO: 41007 - protein, 9 aa, synthetic construct
LNLPEESQW

SEQ ID NO: 41008 - protein, 9 aa, synthetic construct
YNAPTENYW

SEQ ID NO: 41009 - protein, 9 aa, synthetic construct
TNWPEEDDW

SEQ ID NO: 41010 - protein, 9 aa, synthetic construct
SNAPEENEW

SEQ ID NO: 41011 - protein, 9 aa, synthetic construct
LNLPEESNW

SEQ ID NO: 41012 - protein, 9 aa, synthetic construct
SNFPEESNW

SEQ ID NO: 41013 - protein, 9 aa, synthetic construct
INLPEESDW

SEQ ID NO: 41014 - protein, 9 aa, synthetic construct
HRMPEESDW

SEQ ID NO: 41015 - protein, 9 aa, synthetic construct
GNQPVEDDW

SEQ ID NO: 41016 - protein, 9 aa, synthetic construct
YNPPEENTW

SEQ ID NO: 41017 - protein, 9 aa, synthetic construct
LNLPEESSW

SEQ ID NO: 41018 - protein, 9 aa, synthetic construct
FNEPMEVDW

SEQ ID NO: 41019 - protein, 9 aa, synthetic construct
RNDPVEMDW

SEQ ID NO: 41020 - protein, 9 aa, synthetic construct
RNYPTESDW

SEQ ID NO: 41021 - protein, 9 aa, synthetic construct
ARFPEENTW

SEQ ID NO: 41022 - protein, 9 aa, synthetic construct
YNAPTEDEW

SEQ ID NO: 41023 - protein, 9 aa, synthetic construct
FYAPTENEW

SEQ ID NO: 41024 - protein, 9 aa, synthetic construct
ARFPEESDW

SEQ ID NO: 41025 - protein, 9 aa, synthetic construct
KNTPEENDW

SEQ ID NO: 41026 - protein, 9 aa, synthetic construct
RNVPVESDW

SEQ ID NO: 41027 - protein, 9 aa, synthetic construct
SNFPEENDW

SEQ ID NO: 41028 - protein, 9 aa, synthetic construct
LNVPEENDW

SEQ ID NO: 41029 - protein, 9 aa, synthetic construct
RSIPVESTW

SEQ ID NO: 41030 - protein, 9 aa, synthetic construct
VNYPTENDW

SEQ ID NO: 41031 - protein, 9 aa, synthetic construct
NMFPEETDW

SEQ ID NO: 41032 - protein, 9 aa, synthetic construct
FFAPTENEW

SEQ ID NO: 41033 - protein, 9 aa, synthetic construct
YNAPTENEW

SEQ ID NO: 41034 - protein, 9 aa, synthetic construct
LYLPEESDW

SEQ ID NO: 41035 - protein, 9 aa, synthetic construct
LNLPQESDW

SEQ ID NO: 41036 - protein, 9 aa, synthetic construct
ARFPEENEW

SEQ ID NO: 41037 - protein, 9 aa, synthetic construct
ARFPEENDW

SEQ ID NO: 41038 - protein, 9 aa, synthetic construct
MNQPTETDW

SEQ ID NO: 41039 - protein, 9 aa, synthetic construct
YNTPEENDW

SEQ ID NO: 41040 - protein, 9 aa, synthetic construct
GNQPVESDW

SEQ ID NO: 41041 - protein, 9 aa, synthetic construct
WNKPIESDW

SEQ ID NO: 41042 - protein, 9 aa, synthetic construct
YNAPTESDW

SEQ ID NO: 41043 - protein, 9 aa, synthetic construct
INVPIESNW

SEQ ID NO: 41044 - protein, 9 aa, synthetic construct
RNVPEESEW

SEQ ID NO: 41045 - protein, 9 aa, synthetic construct
LNTPSESTW

SEQ ID NO: 41046 - protein, 9 aa, synthetic construct
LSLPEESDW

SEQ ID NO: 41047 - protein, 9 aa, synthetic construct
RNLPEESDW

SEQ ID NO: 41048 - protein, 9 aa, synthetic construct
HNAPTENEW

SEQ ID NO: 41049 - protein, 9 aa, synthetic construct
MNFPEENNW

SEQ ID NO: 41050 - protein, 9 aa, synthetic construct
FFGPMENDW

SEQ ID NO: 41051 - protein, 9 aa, synthetic construct
YNPPTENEW

SEQ ID NO: 41052 - protein, 9 aa, synthetic construct
LNVPVESDW

SEQ ID NO: 41053 - protein, 9 aa, synthetic construct
NNGPEESTW

SEQ ID NO: 41054 - protein, 9 aa, synthetic construct
PRMPEEVTY

SEQ ID NO: 41055 - protein, 9 aa, synthetic construct
YNAPTESNW

SEQ ID NO: 41056 - protein, 9 aa, synthetic construct
LNLPKESDW

SEQ ID NO: 41057 - protein, 9 aa, synthetic construct
LNLPEENYW

SEQ ID NO: 41058 - protein, 9 aa, synthetic construct
PNLPEESDW

SEQ ID NO: 41059 - protein, 9 aa, synthetic construct
YNAPTEDDW

SEQ ID NO: 41060 - protein, 9 aa, synthetic construct
MNIPLESDW

SEQ ID NO: 41061 - protein, 9 aa, synthetic construct
LNLPVEDDW

SEQ ID NO: 41062 - protein, 9 aa, synthetic construct
LSWPEENDW

SEQ ID NO: 41063 - protein, 9 aa, synthetic construct
TNMPIEDEW

SEQ ID NO: 41064 - protein, 9 aa, synthetic construct
YNAPTENGW

SEQ ID NO: 41065 - protein, 9 aa, synthetic construct
LNLPEESDR

SEQ ID NO: 41066 - protein, 9 aa, synthetic construct
LNSPEESDW

SEQ ID NO: 41067 - protein, 9 aa, synthetic construct
VNTPTESTW

SEQ ID NO: 41068 - protein, 9 aa, synthetic construct
HSWPEESDW

SEQ ID NO: 41069 - protein, 9 aa, synthetic construct
SRHPVEDDW

SEQ ID NO: 41070 - protein, 9 aa, synthetic construct
LNFPEESDW

SEQ ID NO: 41071 - protein, 9 aa, synthetic construct
RNQPTEDYW

SEQ ID NO: 41072 - protein, 9 aa, synthetic construct
WSHPEESEW

SEQ ID NO: 41073 - protein, 9 aa, synthetic construct
HNVPEESDW

SEQ ID NO: 41074 - protein, 9 aa, synthetic construct
YNSPTENEW

SEQ ID NO: 41075 - protein, 26 aa, synthetic construct
ZZZZZZZZZZZZZZZZZZZZZZZZZZ

SEQ ID NO: 41076 - protein, 9 aa, synthetic construct
SSPPDESRV

SEQ ID NO: 41077 - protein, 9 aa, synthetic construct
TPGPAERRP

SEQ ID NO: 41078 - protein, 9 aa, synthetic construct
PEEPSETKS

SEQ ID NO: 41079 - protein, 9 aa, synthetic construct
AHVPSEGLL

SEQ ID NO: 41080 - protein, 9 aa, synthetic construct
PLSPTEPLT

SEQ ID NO: 41081 - protein, 9 aa, synthetic construct
SYTPHEPPW

SEQ ID NO: 41082 - protein, 9 aa, synthetic construct
SSPPWEPLP

SEQ ID NO: 41083 - protein, 9 aa, synthetic construct
PQPPSEPPP

SEQ ID NO: 41084 - protein, 9 aa, synthetic construct
SWGPDEGVA

SEQ ID NO: 41085 - protein, 9 aa, synthetic construct
ADLPPECES

SEQ ID NO: 41086 - protein, 9 aa, synthetic construct
SVRPMEPAG

SEQ ID NO: 41087 - protein, 9 aa, synthetic construct
PSPPQEPRP

SEQ ID NO: 41088 - protein, 9 aa, synthetic construct
PRRPPEPLP

SEQ ID NO: 41089 - protein, 9 aa, synthetic construct
PRYPREPDR

SEQ ID NO: 41090 - protein, 9 aa, synthetic construct
PALPDEPTS

SEQ ID NO: 41091 - protein, 9 aa, synthetic construct
SPPPQEPAT

SEQ ID NO: 41092 - protein, 9 aa, synthetic construct
SLPPSEPPP

SEQ ID NO: 41093 - protein, 9 aa, synthetic construct
PPPPPEQQS

SEQ ID NO: 41094 - protein, 9 aa, synthetic construct
PDAPGEHSS

SEQ ID NO: 41095 - protein, 9 aa, synthetic construct
PPPPTEHQL

SEQ ID NO: 41096 - protein, 9 aa, synthetic construct
PTTPPERPT

SEQ ID NO: 41097 - protein, 9 aa, synthetic construct
ALQPAERPL

SEQ ID NO: 41098 - protein, 9 aa, synthetic construct
QRAPPEPRQ

SEQ ID NO: 41099 - protein, 9 aa, synthetic construct
SAPPHELLL

SEQ ID NO: 41100 - protein, 9 aa, synthetic construct
PRPPPELPS

SEQ ID NO: 41101 - protein, 9 aa, synthetic construct
SATPQECPA

SEQ ID NO: 41102 - protein, 9 aa, synthetic construct
WGAPREGGS

SEQ ID NO: 41103 - protein, 9 aa, synthetic construct
PPPPPEPLQ

SEQ ID NO: 41104 - protein, 9 aa, synthetic construct
PERPTEQAS

SEQ ID NO: 41105 - protein, 9 aa, synthetic construct
HEVPSELRL

SEQ ID NO: 41106 - protein, 9 aa, synthetic construct
RRPPTECAI

SEQ ID NO: 41107 - protein, 9 aa, synthetic construct
PSPPPEPLR

SEQ ID NO: 41108 - protein, 9 aa, synthetic construct
STPPSEGPY

SEQ ID NO: 41109 - protein, 9 aa, synthetic construct
AFWPSEQIT

SEQ ID NO: 41110 - protein, 9 aa, synthetic construct
EAAPAERPG

SEQ ID NO: 41111 - protein, 9 aa, synthetic construct
PTSPHEPPR

SEQ ID NO: 41112 - protein, 9 aa, synthetic construct
SSRPAETIG

SEQ ID NO: 41113 - protein, 9 aa, synthetic construct
PNAPQELRS

SEQ ID NO: 41114 - protein, 9 aa, synthetic construct
SYTPLEQPR

SEQ ID NO: 41115 - protein, 9 aa, synthetic construct
PATPRESSP

SEQ ID NO: 41116 - protein, 9 aa, synthetic construct
PPVPPEAHP

SEQ ID NO: 41117 - protein, 9 aa, synthetic construct
STPPPEPGS

SEQ ID NO: 41118 - protein, 9 aa, synthetic construct
PAIPTERTT

SEQ ID NO: 41119 - protein, 9 aa, synthetic construct
AYVPTERTR

SEQ ID NO: 41120 - protein, 9 aa, synthetic construct
HYTPFEPNH

SEQ ID NO: 41121 - protein, 9 aa, synthetic construct
QAFPVEPPS

SEQ ID NO: 41122 - protein, 9 aa, synthetic construct
PTSPPERAQ

SEQ ID NO: 41123 - protein, 9 aa, synthetic construct
PPPPIERPP

SEQ ID NO: 41124 - protein, 9 aa, synthetic construct
PRPPTEPMR

SEQ ID NO: 41125 - protein, 9 aa, synthetic construct
PSTPPESVV

SEQ ID NO: 41126 - protein, 9 aa, synthetic construct
RLPPAEPGT

SEQ ID NO: 41127 - protein, 9 aa, synthetic construct
PAHPPEATT

SEQ ID NO: 41128 - protein, 9 aa, synthetic construct
TDLPGEEAH

SEQ ID NO: 41129 - protein, 9 aa, synthetic construct
PVNPWENPN

SEQ ID NO: 41130 - protein, 9 aa, synthetic construct
SSRPSEPPS

SEQ ID NO: 41131 - protein, 9 aa, synthetic construct
PRPPLESAP

SEQ ID NO: 41132 - protein, 9 aa, synthetic construct
SMPPREWSE

SEQ ID NO: 41133 - protein, 9 aa, synthetic construct
SSFPAEMKH

SEQ ID NO: 41134 - protein, 9 aa, synthetic construct
PPPPTEPAG

SEQ ID NO: 41135 - protein, 9 aa, synthetic construct
SAPPFESVW

SEQ ID NO: 41136 - protein, 9 aa, synthetic construct
PGAPTETPS

SEQ ID NO: 41137 - protein, 9 aa, synthetic construct
QLLPEESPE

SEQ ID NO: 41138 - protein, 9 aa, synthetic construct
ESGPPELPM

SEQ ID NO: 41139 - protein, 9 aa, synthetic construct
ASAPPERLA

SEQ ID NO: 41140 - protein, 9 aa, synthetic construct
SSEPSEHTT

SEQ ID NO: 41141 - protein, 9 aa, synthetic construct
AWPPLEQIQ

SEQ ID NO: 41142 - protein, 9 aa, synthetic construct
HFSPTEPTT

SEQ ID NO: 41143 - protein, 9 aa, synthetic construct
GVPPEETPH

SEQ ID NO: 41144 - protein, 9 aa, synthetic construct
PLLPQEPAM

SEQ ID NO: 41145 - protein, 9 aa, synthetic construct
PTTPEEPIL

SEQ ID NO: 41146 - protein, 9 aa, synthetic construct
ADPPTENLT

SEQ ID NO: 41147 - protein, 9 aa, synthetic construct
AKSPTEWPV

SEQ ID NO: 41148 - protein, 9 aa, synthetic construct
TVHPSEASA

SEQ ID NO: 41149 - protein, 9 aa, synthetic construct
ASWPHEYTP

SEQ ID NO: 41150 - protein, 9 aa, synthetic construct
SGGPVESPE

SEQ ID NO: 41151 - protein, 9 aa, synthetic construct
ASLPTEPGP

SEQ ID NO: 41152 - protein, 9 aa, synthetic construct
HMTPSERRA

SEQ ID NO: 41153 - protein, 9 aa, synthetic construct
SPQPRENDL

SEQ ID NO: 41154 - protein, 9 aa, synthetic construct
QPRPDEHLY

SEQ ID NO: 41155 - protein, 9 aa, synthetic construct
ESEPWEETR

SEQ ID NO: 41156 - protein, 9 aa, synthetic construct
AATPKERPN

SEQ ID NO: 41157 - protein, 9 aa, synthetic construct
SEPPSETEN

SEQ ID NO: 41158 - protein, 9 aa, synthetic construct
THTPREHPR

SEQ ID NO: 41159 - protein, 9 aa, synthetic construct
PYVPAESGQ

SEQ ID NO: 41160 - protein, 9 aa, synthetic construct
LTGPAETPL

SEQ ID NO: 41161 - protein, 9 aa, synthetic construct
LTPPGEQGR

SEQ ID NO: 41162 - protein, 9 aa, synthetic construct
SGSPHEHPA

SEQ ID NO: 41163 - protein, 9 aa, synthetic construct
SGTPSEIDL

SEQ ID NO: 41164 - protein, 9 aa, synthetic construct
HFHPHEPLI

SEQ ID NO: 41165 - protein, 9 aa, synthetic construct
ATPPSELPN

SEQ ID NO: 41166 - protein, 9 aa, synthetic construct
SHTPSEIGP

SEQ ID NO: 41167 - protein, 9 aa, synthetic construct
SPAPPECHN

SEQ ID NO: 41168 - protein, 9 aa, synthetic construct
PLSPPESNQ

SEQ ID NO: 41169 - protein, 9 aa, synthetic construct
PPPPTESNP

SEQ ID NO: 41170 - protein, 9 aa, synthetic construct
PHTPTESPL

SEQ ID NO: 41171 - protein, 9 aa, synthetic construct
SLPPREYQT

SEQ ID NO: 41172 - protein, 9 aa, synthetic construct
EVLPSEPLY

SEQ ID NO: 41173 - protein, 9 aa, synthetic construct
ELTPQELQS

SEQ ID NO: 41174 - protein, 9 aa, synthetic construct
ANFPSEPLP

SEQ ID NO: 41175 - protein, 9 aa, synthetic construct
STPPTEHAQ

SEQ ID NO: 41176 - protein, 9 aa, synthetic construct
PPHPAEEHT

SEQ ID NO: 41177 - protein, 9 aa, synthetic construct
SLWPPEGAT

SEQ ID NO: 41178 - protein, 9 aa, synthetic construct
SATPLERIS

SEQ ID NO: 41179 - protein, 9 aa, synthetic construct
PTPPTETAH

SEQ ID NO: 41180 - protein, 9 aa, synthetic construct
PLIPSEPQP

SEQ ID NO: 41181 - protein, 9 aa, synthetic construct
EHLPTEGLL

SEQ ID NO: 41182 - protein, 9 aa, synthetic construct
LYCPSELNY

SEQ ID NO: 41183 - protein, 9 aa, synthetic construct
YLPPPETRR

SEQ ID NO: 41184 - protein, 9 aa, synthetic construct
PHYPPESSP

SEQ ID NO: 41185 - protein, 9 aa, synthetic construct
SLPPPEPNN

SEQ ID NO: 41186 - protein, 9 aa, synthetic construct
LLLPYEVRT

SEQ ID NO: 41187 - protein, 9 aa, synthetic construct
STSPKENEQ

SEQ ID NO: 41188 - protein, 9 aa, synthetic construct
PAMPKEDLV

SEQ ID NO: 41189 - protein, 9 aa, synthetic construct
PQRPMETTV

SEQ ID NO: 41190 - protein, 9 aa, synthetic construct
LTRPQESEG

SEQ ID NO: 41191 - protein, 9 aa, synthetic construct
GNCPLEPWT

SEQ ID NO: 41192 - protein, 9 aa, synthetic construct
TPPPTEPPF

SEQ ID NO: 41193 - protein, 9 aa, synthetic construct
HVAPPEPLY

SEQ ID NO: 41194 - protein, 9 aa, synthetic construct
LPPPGERTW

SEQ ID NO: 41195 - protein, 9 aa, synthetic construct
PTYPSENLN

SEQ ID NO: 41196 - protein, 9 aa, synthetic construct
PYNPNETHS

SEQ ID NO: 41197 - protein, 9 aa, synthetic construct
LFTPSEDNK

SEQ ID NO: 41198 - protein, 9 aa, synthetic construct
PLLPWERFV

SEQ ID NO: 41199 - protein, 9 aa, synthetic construct
LFPPTEPAP

SEQ ID NO: 41200 - protein, 9 aa, synthetic construct
LYLPLEAYS

SEQ ID NO: 41201 - protein, 9 aa, synthetic construct
GADPNERPP

SEQ ID NO: 41202 - protein, 9 aa, synthetic construct
SDAPSEMAT

SEQ ID NO: 41203 - protein, 9 aa, synthetic construct
RVDPGETEL

SEQ ID NO: 41204 - protein, 9 aa, synthetic construct
ENMPEESGD

SEQ ID NO: 41205 - protein, 9 aa, synthetic construct
QLPPPEPLI

SEQ ID NO: 41206 - protein, 9 aa, synthetic construct
LVLPREEMH

SEQ ID NO: 41207 - protein, 9 aa, synthetic construct
ALPPPEAPK

SEQ ID NO: 41208 - protein, 9 aa, synthetic construct
TGRPSEPHS

SEQ ID NO: 41209 - protein, 9 aa, synthetic construct
PISPQEHSS

SEQ ID NO: 41210 - protein, 9 aa, synthetic construct
PPQPVEHRL

SEQ ID NO: 41211 - protein, 9 aa, synthetic construct
LRLPPEPSQ

SEQ ID NO: 41212 - protein, 9 aa, synthetic construct
STPPPEYTN

SEQ ID NO: 41213 - protein, 9 aa, synthetic construct
STTPQEPPN

SEQ ID NO: 41214 - protein, 9 aa, synthetic construct
PLRPVEQSP

SEQ ID NO: 41215 - protein, 9 aa, synthetic construct
HCTPAEATN

SEQ ID NO: 41216 - protein, 9 aa, synthetic construct
LSWPHEASN

SEQ ID NO: 41217 - protein, 9 aa, synthetic construct
LAPPGEPDE

SEQ ID NO: 41218 - protein, 9 aa, synthetic construct
RLSPAEVPH

SEQ ID NO: 41219 - protein, 9 aa, synthetic construct
YLLPPEASA

SEQ ID NO: 41220 - protein, 9 aa, synthetic construct
SLEPLELAD

SEQ ID NO: 41221 - protein, 9 aa, synthetic construct
SPLPSERSH

SEQ ID NO: 41222 - protein, 9 aa, synthetic construct
HLCPTESLT

SEQ ID NO: 41223 - protein, 9 aa, synthetic construct
PPTPPEAMS

SEQ ID NO: 41224 - protein, 9 aa, synthetic construct
PPRPREAPH

SEQ ID NO: 41225 - protein, 9 aa, synthetic construct
PHLPVEEDE

SEQ ID NO: 41226 - protein, 9 aa, synthetic construct
ACHPNESSG

SEQ ID NO: 41227 - protein, 9 aa, synthetic construct
RADPHESQL

SEQ ID NO: 41228 - protein, 9 aa, synthetic construct
LTPPQEPTR

SEQ ID NO: 41229 - protein, 9 aa, synthetic construct
PPSPCERLT

SEQ ID NO: 41230 - protein, 9 aa, synthetic construct
HPCPPERPY

SEQ ID NO: 41231 - protein, 9 aa, synthetic construct
STSPAEFLL

SEQ ID NO: 41232 - protein, 9 aa, synthetic construct
PKSPWESIS

SEQ ID NO: 41233 - protein, 9 aa, synthetic construct
LVPPLESAP

SEQ ID NO: 41234 - protein, 9 aa, synthetic construct
PCTPKEPAS

SEQ ID NO: 41235 - protein, 9 aa, synthetic construct
REWPREWML

SEQ ID NO: 41236 - protein, 9 aa, synthetic construct
QAPPPEYVV

SEQ ID NO: 41237 - protein, 9 aa, synthetic construct
QHYPREPFW

SEQ ID NO: 41238 - protein, 9 aa, synthetic construct
PLPPDEPLL

SEQ ID NO: 41239 - protein, 9 aa, synthetic construct
ATPPCEPPF

SEQ ID NO: 41240 - protein, 9 aa, synthetic construct
GVRPQESAA

SEQ ID NO: 41241 - protein, 9 aa, synthetic construct
TRGPPEPAP

SEQ ID NO: 41242 - protein, 9 aa, synthetic construct
PTLPPELWA

SEQ ID NO: 41243 - protein, 9 aa, synthetic construct
GGPPSEPAR

SEQ ID NO: 41244 - protein, 9 aa, synthetic construct
LHSPTESGA

SEQ ID NO: 41245 - protein, 9 aa, synthetic construct
SNPPKEPLH

SEQ ID NO: 41246 - protein, 9 aa, synthetic construct
LGRPVEARL

SEQ ID NO: 41247 - protein, 9 aa, synthetic construct
ENEPWEWPY

SEQ ID NO: 41248 - protein, 9 aa, synthetic construct
PGMPSESKS

SEQ ID NO: 41249 - protein, 9 aa, synthetic construct
ERTPMEQWP

SEQ ID NO: 41250 - protein, 9 aa, synthetic construct
HSLPHESRK

SEQ ID NO: 41251 - protein, 9 aa, synthetic construct
HELPGERLI

SEQ ID NO: 41252 - protein, 9 aa, synthetic construct
PKKPKEPHS

SEQ ID NO: 41253 - protein, 9 aa, synthetic construct
HYKPVERKA

SEQ ID NO: 41254 - protein, 9 aa, synthetic construct
SSRPQEMSA

SEQ ID NO: 41255 - protein, 9 aa, synthetic construct
HDTPNENNN

SEQ ID NO: 41256 - protein, 9 aa, synthetic construct
SPCPPELPS

SEQ ID NO: 41257 - protein, 9 aa, synthetic construct
PGIPQENLL

SEQ ID NO: 41258 - protein, 9 aa, synthetic construct
PSPPHESRR

SEQ ID NO: 41259 - protein, 9 aa, synthetic construct
HFNPGETDR

SEQ ID NO: 41260 - protein, 9 aa, synthetic construct
HWTPWESQF

SEQ ID NO: 41261 - protein, 9 aa, synthetic construct
GAEPAEPLN

SEQ ID NO: 41262 - protein, 9 aa, synthetic construct
LGLPQERSM

SEQ ID NO: 41263 - protein, 9 aa, synthetic construct
LSPPPEPFQ

SEQ ID NO: 41264 - protein, 9 aa, synthetic construct
HLWPKENPS

SEQ ID NO: 41265 - protein, 9 aa, synthetic construct
LDIPSEMNG

SEQ ID NO: 41266 - protein, 9 aa, synthetic construct
LSPPYEIRT

SEQ ID NO: 41267 - protein, 9 aa, synthetic construct
PSPPVEDIT

SEQ ID NO: 41268 - protein, 9 aa, synthetic construct
TYAPPEHLT

SEQ ID NO: 41269 - protein, 9 aa, synthetic construct
DRTPPERLH

SEQ ID NO: 41270 - protein, 9 aa, synthetic construct
SNPPMEPFI

SEQ ID NO: 41271 - protein, 9 aa, synthetic construct
SNKPMESRP

SEQ ID NO: 41272 - protein, 9 aa, synthetic construct
SHNPSEISL

SEQ ID NO: 41273 - protein, 9 aa, synthetic construct
STHPSEFWP

SEQ ID NO: 41274 - protein, 9 aa, synthetic construct
GVDPGEHTQ

SEQ ID NO: 41275 - protein, 9 aa, synthetic construct
ALLPPEVLP

SEQ ID NO: 41276 - protein, 9 aa, synthetic construct
HWGPFESTP

SEQ ID NO: 41277 - protein, 9 aa, synthetic construct
HRTPWEVSV

SEQ ID NO: 41278 - protein, 9 aa, synthetic construct
LTAPGERLA

SEQ ID NO: 41279 - protein, 9 aa, synthetic construct
CEKPWELPP

SEQ ID NO: 41280 - protein, 9 aa, synthetic construct
LCLPTEPRV

SEQ ID NO: 41281 - protein, 9 aa, synthetic construct
HFHPHETTM

SEQ ID NO: 41282 - protein, 9 aa, synthetic construct
FKPPLETPS

SEQ ID NO: 41283 - protein, 9 aa, synthetic construct
QGSPFELYN

SEQ ID NO: 41284 - protein, 9 aa, synthetic construct
YSQPPEPKL

SEQ ID NO: 41285 - protein, 9 aa, synthetic construct
HLPPWETGF

SEQ ID NO: 41286 - protein, 9 aa, synthetic construct
YTTPHERDT

SEQ ID NO: 41287 - protein, 9 aa, synthetic construct
SYTPVETFP

SEQ ID NO: 41288 - protein, 9 aa, synthetic construct
WTQPGEPMI

SEQ ID NO: 41289 - protein, 9 aa, synthetic construct
PHTPSEDIP

SEQ ID NO: 41290 - protein, 9 aa, synthetic construct
TQQPSEPTW

SEQ ID NO: 41291 - protein, 9 aa, synthetic construct
TNNPREPFP

SEQ ID NO: 41292 - protein, 9 aa, synthetic construct
AHLPDEQQC

SEQ ID NO: 41293 - protein, 9 aa, synthetic construct
HTRPHELPE

SEQ ID NO: 41294 - protein, 9 aa, synthetic construct
QCKPWEPSS

SEQ ID NO: 41295 - protein, 9 aa, synthetic construct
LHPPMEQGP

SEQ ID NO: 41296 - protein, 9 aa, synthetic construct
LLLPSENPP

SEQ ID NO: 41297 - protein, 9 aa, synthetic construct
HLLPLEFRS

SEQ ID NO: 41298 - protein, 9 aa, synthetic construct
APSPSEPHL

SEQ ID NO: 41299 - protein, 9 aa, synthetic construct
HGVPKENNI

SEQ ID NO: 41300 - protein, 9 aa, synthetic construct
DDGPEEEPS

SEQ ID NO: 41301 - protein, 9 aa, synthetic construct
HYEPRERMV

SEQ ID NO: 41302 - protein, 9 aa, synthetic construct
HEVPSEITM

SEQ ID NO: 41303 - protein, 9 aa, synthetic construct
HDNPGEPPR

SEQ ID NO: 41304 - protein, 9 aa, synthetic construct
PSQPMEFTT

SEQ ID NO: 41305 - protein, 9 aa, synthetic construct
PPTPQEPLL

SEQ ID NO: 41306 - protein, 9 aa, synthetic construct
SAPPMEQHN

SEQ ID NO: 41307 - protein, 9 aa, synthetic construct
LETPTEPMT

SEQ ID NO: 41308 - protein, 9 aa, synthetic construct
DGGPTEVNM

SEQ ID NO: 41309 - protein, 9 aa, synthetic construct
PCKPCEHHV

SEQ ID NO: 41310 - protein, 9 aa, synthetic construct
PYKPNESNK

SEQ ID NO: 41311 - protein, 9 aa, synthetic construct
LLSPSETLF

SEQ ID NO: 41312 - protein, 9 aa, synthetic construct
QHEPIETPR

SEQ ID NO: 41313 - protein, 9 aa, synthetic construct
SDTPSEQNG

SEQ ID NO: 41314 - protein, 9 aa, synthetic construct
ATSPTEPIS

SEQ ID NO: 41315 - protein, 9 aa, synthetic construct
TAPPAELRT

SEQ ID NO: 41316 - protein, 9 aa, synthetic construct
PALPPELRA

SEQ ID NO: 41317 - protein, 9 aa, synthetic construct
PILPGEFRG

SEQ ID NO: 41318 - protein, 9 aa, synthetic construct
HPLPHEPRL

SEQ ID NO: 41319 - protein, 9 aa, synthetic construct
PYTPKEQLW

SEQ ID NO: 41320 - protein, 9 aa, synthetic construct
EDKPPETIG

SEQ ID NO: 41321 - protein, 9 aa, synthetic construct
HAPPGEPGW

SEQ ID NO: 41322 - protein, 9 aa, synthetic construct
TPSPREPSP

SEQ ID NO: 41323 - protein, 9 aa, synthetic construct
LILPSEALT

SEQ ID NO: 41324 - protein, 9 aa, synthetic construct
HTPPAEGAI

SEQ ID NO: 41325 - protein, 9 aa, synthetic construct
EPHPPELLF

SEQ ID NO: 41326 - protein, 9 aa, synthetic construct
WLPPSEIPK

SEQ ID NO: 41327 - protein, 9 aa, synthetic construct
PNTPPENPM

SEQ ID NO: 41328 - protein, 9 aa, synthetic construct
HNSPRETSD

SEQ ID NO: 41329 - protein, 9 aa, synthetic construct
PQVPHELLK

SEQ ID NO: 41330 - protein, 9 aa, synthetic construct
EPKPWEHNW

SEQ ID NO: 41331 - protein, 9 aa, synthetic construct
STNPLEGSI

SEQ ID NO: 41332 - protein, 9 aa, synthetic construct
THTPPEHAV

SEQ ID NO: 41333 - protein, 9 aa, synthetic construct
LWNPRELRL

SEQ ID NO: 41334 - protein, 9 aa, synthetic construct
TLLPSERST

SEQ ID NO: 41335 - protein, 9 aa, synthetic construct
QENPRERVL

SEQ ID NO: 41336 - protein, 9 aa, synthetic construct
RPGPSEHHH

SEQ ID NO: 41337 - protein, 9 aa, synthetic construct
HYPPLETLS

SEQ ID NO: 41338 - protein, 9 aa, synthetic construct
HLKPHEWTN

SEQ ID NO: 41339 - protein, 9 aa, synthetic construct
DVVPAESHS

SEQ ID NO: 41340 - protein, 9 aa, synthetic construct
RQVPCEEIS

SEQ ID NO: 41341 - protein, 9 aa, synthetic construct
TTGPVEMGF

SEQ ID NO: 41342 - protein, 9 aa, synthetic construct
WDVPPERNS

SEQ ID NO: 41343 - protein, 9 aa, synthetic construct
VGGPGEMTE

SEQ ID NO: 41344 - protein, 9 aa, synthetic construct
LGRPGELHQ

SEQ ID NO: 41345 - protein, 9 aa, synthetic construct
EIQPQEHPT

SEQ ID NO: 41346 - protein, 9 aa, synthetic construct
SNQPLETHT

SEQ ID NO: 41347 - protein, 9 aa, synthetic construct
SPAPSETSR

SEQ ID NO: 41348 - protein, 9 aa, synthetic construct
GHQPPEVPT

SEQ ID NO: 41349 - protein, 9 aa, synthetic construct
KCDPREVPV

SEQ ID NO: 41350 - protein, 9 aa, synthetic construct
RPYPRECRL

SEQ ID NO: 41351 - protein, 9 aa, synthetic construct
QHQPSEVRT

SEQ ID NO: 41352 - protein, 9 aa, synthetic construct
TRLPMELTR

SEQ ID NO: 41353 - protein, 9 aa, synthetic construct
ERTPGEHDV

SEQ ID NO: 41354 - protein, 9 aa, synthetic construct
LYMPKESFR

SEQ ID NO: 41355 - protein, 9 aa, synthetic construct
WLKPPEKYA

SEQ ID NO: 41356 - protein, 9 aa, synthetic construct
HVMPTEHKM

SEQ ID NO: 41357 - protein, 9 aa, synthetic construct
CRGPSEHGS

SEQ ID NO: 41358 - protein, 9 aa, synthetic construct
RSRPTEIGS

SEQ ID NO: 41359 - protein, 9 aa, synthetic construct
PGPPMEAKF

SEQ ID NO: 41360 - protein, 9 aa, synthetic construct
QLFPTETTI

SEQ ID NO: 41361 - protein, 9 aa, synthetic construct
PLRPGENAS

SEQ ID NO: 41362 - protein, 9 aa, synthetic construct
ALSPAEDLT

SEQ ID NO: 41363 - protein, 9 aa, synthetic construct
EMRPPETTS

SEQ ID NO: 41364 - protein, 9 aa, synthetic construct
YIPPGELMP

SEQ ID NO: 41365 - protein, 9 aa, synthetic construct
LSPPRELQP

SEQ ID NO: 41366 - protein, 9 aa, synthetic construct
LPPPREPIL

SEQ ID NO: 41367 - protein, 9 aa, synthetic construct
AVPPLEPHT

SEQ ID NO: 41368 - protein, 9 aa, synthetic construct
SQRPSETTH

SEQ ID NO: 41369 - protein, 9 aa, synthetic construct
ESQPEEVPS

SEQ ID NO: 41370 - protein, 9 aa, synthetic construct
QYYPSEFAH

SEQ ID NO: 41371 - protein, 9 aa, synthetic construct
PLFPKEPPN

SEQ ID NO: 41372 - protein, 9 aa, synthetic construct
GRVPHETMN

SEQ ID NO: 41373 - protein, 9 aa, synthetic construct
PLAPNEYEH

SEQ ID NO: 41374 - protein, 9 aa, synthetic construct
HSPPYETLS

SEQ ID NO: 41375 - protein, 9 aa, synthetic construct
TRDPREVWS

SEQ ID NO: 41376 - protein, 9 aa, synthetic construct
EPSPPERTP

SEQ ID NO: 41377 - protein, 9 aa, synthetic construct
SPDPHEMML

SEQ ID NO: 41378 - protein, 9 aa, synthetic construct
HSWPYEYVW

SEQ ID NO: 41379 - protein, 9 aa, synthetic construct
LSRPAENGD

SEQ ID NO: 41380 - protein, 9 aa, synthetic construct
SLYPPELPA

SEQ ID NO: 41381 - protein, 9 aa, synthetic construct
DRNPREQRG

SEQ ID NO: 41382 - protein, 9 aa, synthetic construct
KVEPPEPTT

SEQ ID NO: 41383 - protein, 9 aa, synthetic construct
LKSPAEWFM

SEQ ID NO: 41384 - protein, 9 aa, synthetic construct
PLPPIEYTQ

SEQ ID NO: 41385 - protein, 9 aa, synthetic construct
LPSPSEWTY

SEQ ID NO: 41386 - protein, 9 aa, synthetic construct
AMQPQELSF

SEQ ID NO: 41387 - protein, 9 aa, synthetic construct
LLGPAEHNG

SEQ ID NO: 41388 - protein, 9 aa, synthetic construct
LTTPLEPSW

SEQ ID NO: 41389 - protein, 9 aa, synthetic construct
YWLPTEANH

SEQ ID NO: 41390 - protein, 9 aa, synthetic construct
ASDPEEIQM

SEQ ID NO: 41391 - protein, 9 aa, synthetic construct
GAPPGEVRS

SEQ ID NO: 41392 - protein, 9 aa, synthetic construct
KSTPPEQAG

SEQ ID NO: 41393 - protein, 9 aa, synthetic construct
GLLPAESIV

SEQ ID NO: 41394 - protein, 9 aa, synthetic construct
APAPVENMV

SEQ ID NO: 41395 - protein, 9 aa, synthetic construct
PAAPTEQSR

SEQ ID NO: 41396 - protein, 9 aa, synthetic construct
LRSPAEVHS

SEQ ID NO: 41397 - protein, 9 aa, synthetic construct
PREPIEQNF

SEQ ID NO: 41398 - protein, 9 aa, synthetic construct
TPPPLEPSA

SEQ ID NO: 41399 - protein, 9 aa, synthetic construct
HFDPTEYNP

SEQ ID NO: 41400 - protein, 9 aa, synthetic construct
WGDPNETPW

SEQ ID NO: 41401 - protein, 9 aa, synthetic construct
AMLPYEGGP

SEQ ID NO: 41402 - protein, 9 aa, synthetic construct
WTHPSELVE

SEQ ID NO: 41403 - protein, 9 aa, synthetic construct
LSSPAEQNS

SEQ ID NO: 41404 - protein, 9 aa, synthetic construct
LLFPHEWSE

SEQ ID NO: 41405 - protein, 9 aa, synthetic construct
PLLPPEPNI

SEQ ID NO: 41406 - protein, 9 aa, synthetic construct
LPIPDESEA

SEQ ID NO: 41407 - protein, 9 aa, synthetic construct
TYPPSEGSP

SEQ ID NO: 41408 - protein, 9 aa, synthetic construct
TPLPPEPPT

SEQ ID NO: 41409 - protein, 9 aa, synthetic construct
SDIPYEWPT

SEQ ID NO: 41410 - protein, 9 aa, synthetic construct
LDSPNENGT

SEQ ID NO: 41411 - protein, 9 aa, synthetic construct
TAAPLEEPR

SEQ ID NO: 41412 - protein, 9 aa, synthetic construct
LLSPSEVPP

SEQ ID NO: 41413 - protein, 9 aa, synthetic construct
SLLPLEHCP

SEQ ID NO: 41414 - protein, 9 aa, synthetic construct
LNNPTEPLK

SEQ ID NO: 41415 - protein, 9 aa, synthetic construct
ASPPEEYLL

SEQ ID NO: 41416 - protein, 9 aa, synthetic construct
HTSPREKGI

SEQ ID NO: 41417 - protein, 9 aa, synthetic construct
AYYPSEPLF

SEQ ID NO: 41418 - protein, 9 aa, synthetic construct
PIRPKEVLS

SEQ ID NO: 41419 - protein, 9 aa, synthetic construct
FGPPSETVR

SEQ ID NO: 41420 - protein, 9 aa, synthetic construct
ATGPAEILA

SEQ ID NO: 41421 - protein, 9 aa, synthetic construct
TDVPLEAAK

SEQ ID NO: 41422 - protein, 9 aa, synthetic construct
VHGPRENFQ

SEQ ID NO: 41423 - protein, 9 aa, synthetic construct
SGVPVELWM

SEQ ID NO: 41424 - protein, 9 aa, synthetic construct
HMLPSEMVA

SEQ ID NO: 41425 - protein, 9 aa, synthetic construct
HEKPVENLT

SEQ ID NO: 41426 - protein, 9 aa, synthetic construct
GAVPLEIPW

SEQ ID NO: 41427 - protein, 9 aa, synthetic construct
DRVPAEPAH

SEQ ID NO: 41428 - protein, 9 aa, synthetic construct
YTAPGEPRI

SEQ ID NO: 41429 - protein, 9 aa, synthetic construct
QFYPSEHSQ

SEQ ID NO: 41430 - protein, 9 aa, synthetic construct
LMPPTEQHR

SEQ ID NO: 41431 - protein, 9 aa, synthetic construct
TNEPEEDLS

SEQ ID NO: 41432 - protein, 9 aa, synthetic construct
ENIPKEPVR

SEQ ID NO: 41433 - protein, 9 aa, synthetic construct
KDAPQELSL

SEQ ID NO: 41434 - protein, 9 aa, synthetic construct
PITPAESRY

SEQ ID NO: 41435 - protein, 9 aa, synthetic construct
RLSPSEIQV

SEQ ID NO: 41436 - protein, 9 aa, synthetic construct
QLLPTESVM

SEQ ID NO: 41437 - protein, 9 aa, synthetic construct
TSPPKEHLF

SEQ ID NO: 41438 - protein, 9 aa, synthetic construct
SNHPDENWI

SEQ ID NO: 41439 - protein, 9 aa, synthetic construct
LDRPHENHS

SEQ ID NO: 41440 - protein, 9 aa, synthetic construct
PPSPTESSQ

SEQ ID NO: 41441 - protein, 9 aa, synthetic construct
RRNPSEQHP

SEQ ID NO: 41442 - protein, 9 aa, synthetic construct
GGAPFEPVF

SEQ ID NO: 41443 - protein, 9 aa, synthetic construct
SIPPSEFHM

SEQ ID NO: 41444 - protein, 9 aa, synthetic construct
QILPLEISI

SEQ ID NO: 41445 - protein, 9 aa, synthetic construct
IMPPKEPPC

SEQ ID NO: 41446 - protein, 9 aa, synthetic construct
PLLPSEPPF

SEQ ID NO: 41447 - protein, 9 aa, synthetic construct
TRAPIESHS

SEQ ID NO: 41448 - protein, 9 aa, synthetic construct
SLLPNESPN

SEQ ID NO: 41449 - protein, 9 aa, synthetic construct
PSYPTEIKI

SEQ ID NO: 41450 - protein, 9 aa, synthetic construct
TAYPAELPS

SEQ ID NO: 41451 - protein, 9 aa, synthetic construct
LIWPAEGGK

SEQ ID NO: 41452 - protein, 9 aa, synthetic construct
HETPAEGDL

SEQ ID NO: 41453 - protein, 9 aa, synthetic construct
GMQPTEGRA

SEQ ID NO: 41454 - protein, 9 aa, synthetic construct
HSNPKERQL

SEQ ID NO: 41455 - protein, 9 aa, synthetic construct
HVLPLEHHR

SEQ ID NO: 41456 - protein, 9 aa, synthetic construct
HVYPMEIAW

SEQ ID NO: 41457 - protein, 9 aa, synthetic construct
QSYPNEAIH

SEQ ID NO: 41458 - protein, 9 aa, synthetic construct
PHPPYEQST

SEQ ID NO: 41459 - protein, 9 aa, synthetic construct
QRFPFETHI

SEQ ID NO: 41460 - protein, 9 aa, synthetic construct
GHRPGETNS

SEQ ID NO: 41461 - protein, 9 aa, synthetic construct
WLYPTEFGG

SEQ ID NO: 41462 - protein, 9 aa, synthetic construct
TTSPREPTD

SEQ ID NO: 41463 - protein, 9 aa, synthetic construct
ALSPSESDG

SEQ ID NO: 41464 - protein, 9 aa, synthetic construct
HGTPDEQLL

SEQ ID NO: 41465 - protein, 9 aa, synthetic construct
HTRPWETFL

SEQ ID NO: 41466 - protein, 9 aa, synthetic construct
TQSPPETPS

SEQ ID NO: 41467 - protein, 9 aa, synthetic construct
WQHPFETHG

SEQ ID NO: 41468 - protein, 9 aa, synthetic construct
PPLPIEYTI

SEQ ID NO: 41469 - protein, 9 aa, synthetic construct
GHLPSEPWV

SEQ ID NO: 41470 - protein, 9 aa, synthetic construct
CSPPAEGVD

SEQ ID NO: 41471 - protein, 9 aa, synthetic construct
HIQPHESKI

SEQ ID NO: 41472 - protein, 9 aa, synthetic construct
QVTPWENSI

SEQ ID NO: 41473 - protein, 9 aa, synthetic construct
SIDPIELSS

SEQ ID NO: 41474 - protein, 9 aa, synthetic construct
PRLPLEPDC

SEQ ID NO: 41475 - protein, 9 aa, synthetic construct
SNLPVENQD

SEQ ID NO: 41476 - protein, 9 aa, synthetic construct
HPDPWEKPK

SEQ ID NO: 41477 - protein, 9 aa, synthetic construct
GWLPEEDMS

SEQ ID NO: 41478 - protein, 9 aa, synthetic construct
SVCPAEIQI

SEQ ID NO: 41479 - protein, 9 aa, synthetic construct
SKSPTEPQI

SEQ ID NO: 41480 - protein, 9 aa, synthetic construct
LPTPNEHWM

SEQ ID NO: 41481 - protein, 9 aa, synthetic construct
PASPPEHAP

SEQ ID NO: 41482 - protein, 9 aa, synthetic construct
CAPPTEPLT

SEQ ID NO: 41483 - protein, 9 aa, synthetic construct
EPLPSETLR

SEQ ID NO: 41484 - protein, 9 aa, synthetic construct
ARYPSESTL

SEQ ID NO: 41485 - protein, 9 aa, synthetic construct
DEKPTETSL

SEQ ID NO: 41486 - protein, 9 aa, synthetic construct
QMPPIENLG

SEQ ID NO: 41487 - protein, 9 aa, synthetic construct
HTTPKENAS

SEQ ID NO: 41488 - protein, 9 aa, synthetic construct
ASGPSEHNP

SEQ ID NO: 41489 - protein, 9 aa, synthetic construct
LPAPSEVYH

SEQ ID NO: 41490 - protein, 9 aa, synthetic construct
KRPPRERLH

SEQ ID NO: 41491 - protein, 9 aa, synthetic construct
PLLPYENRD

SEQ ID NO: 41492 - protein, 9 aa, synthetic construct
HVVPYEPTY

SEQ ID NO: 41493 - protein, 9 aa, synthetic construct
SPPPPEPYL

SEQ ID NO: 41494 - protein, 9 aa, synthetic construct
EVFPAETQS

SEQ ID NO: 41495 - protein, 9 aa, synthetic construct
LTLPMEALY

SEQ ID NO: 41496 - protein, 9 aa, synthetic construct
HALPTETLH

SEQ ID NO: 41497 - protein, 9 aa, synthetic construct
VHWPVEVLL

SEQ ID NO: 41498 - protein, 9 aa, synthetic construct
LPLPSESLL

SEQ ID NO: 41499 - protein, 9 aa, synthetic construct
QRYPPEGLT

SEQ ID NO: 41500 - protein, 9 aa, synthetic construct
RPLPLEVIT

SEQ ID NO: 41501 - protein, 9 aa, synthetic construct
TPLPAEKYP

SEQ ID NO: 41502 - protein, 9 aa, synthetic construct
PNYPQEPQY

SEQ ID NO: 41503 - protein, 9 aa, synthetic construct
PCLPHELYV

SEQ ID NO: 41504 - protein, 9 aa, synthetic construct
STVPQETFP

SEQ ID NO: 41505 - protein, 9 aa, synthetic construct
LGSPSEHLV

SEQ ID NO: 41506 - protein, 9 aa, synthetic construct
TLPPGEHGH

SEQ ID NO: 41507 - protein, 9 aa, synthetic construct
AFDPWETDT

SEQ ID NO: 41508 - protein, 9 aa, synthetic construct
PMHPTEDFT

SEQ ID NO: 41509 - protein, 9 aa, synthetic construct
FSQPPELTP

SEQ ID NO: 41510 - protein, 9 aa, synthetic construct
HMFPHEKLN

SEQ ID NO: 41511 - protein, 9 aa, synthetic construct
SADPNEQQA

SEQ ID NO: 41512 - protein, 9 aa, synthetic construct
RKVPDEHET

SEQ ID NO: 41513 - protein, 9 aa, synthetic construct
RDRPVEWII

SEQ ID NO: 41514 - protein, 9 aa, synthetic construct
PESPIEVQD

SEQ ID NO: 41515 - protein, 9 aa, synthetic construct
PTKPNESCT

SEQ ID NO: 41516 - protein, 9 aa, synthetic construct
PNGPSELLN

SEQ ID NO: 41517 - protein, 9 aa, synthetic construct
DQPPPERPA

SEQ ID NO: 41518 - protein, 9 aa, synthetic construct
TRQPDEGNT

SEQ ID NO: 41519 - protein, 9 aa, synthetic construct
LPTPTEHHS

SEQ ID NO: 41520 - protein, 9 aa, synthetic construct
YPSPGEVLW

SEQ ID NO: 41521 - protein, 9 aa, synthetic construct
LILPQELKL

SEQ ID NO: 41522 - protein, 9 aa, synthetic construct
TLSPLESTE

SEQ ID NO: 41523 - protein, 9 aa, synthetic construct
LDVPIEVNM

SEQ ID NO: 41524 - protein, 9 aa, synthetic construct
DRPPGETVV

SEQ ID NO: 41525 - protein, 9 aa, synthetic construct
RIHPSEPTR

SEQ ID NO: 41526 - protein, 9 aa, synthetic construct
LQPPTEESF

SEQ ID NO: 41527 - protein, 9 aa, synthetic construct
DPLPMEQLV

SEQ ID NO: 41528 - protein, 9 aa, synthetic construct
SALPNESPS

SEQ ID NO: 41529 - protein, 9 aa, synthetic construct
SLDPAEHSN

SEQ ID NO: 41530 - protein, 9 aa, synthetic construct
RLFPLEFFL

SEQ ID NO: 41531 - protein, 9 aa, synthetic construct
HPLPVESPT

SEQ ID NO: 41532 - protein, 9 aa, synthetic construct
PVPPVEPST

SEQ ID NO: 41533 - protein, 9 aa, synthetic construct
QVIPMESPL

SEQ ID NO: 41534 - protein, 9 aa, synthetic construct
HINPIEALT

SEQ ID NO: 41535 - protein, 9 aa, synthetic construct
HTHPQEEAF

SEQ ID NO: 41536 - protein, 9 aa, synthetic construct
LHTPAEVES

SEQ ID NO: 41537 - protein, 9 aa, synthetic construct
ELRPTEPST

SEQ ID NO: 41538 - protein, 9 aa, synthetic construct
QHHPIESST

SEQ ID NO: 41539 - protein, 9 aa, synthetic construct
WNRPSEHMG

SEQ ID NO: 41540 - protein, 9 aa, synthetic construct
PFSPPESHN

SEQ ID NO: 41541 - protein, 9 aa, synthetic construct
LAPPYELPR

SEQ ID NO: 41542 - protein, 9 aa, synthetic construct
LKGPSETPF

SEQ ID NO: 41543 - protein, 9 aa, synthetic construct
LWSPWEKFL

SEQ ID NO: 41544 - protein, 9 aa, synthetic construct
YSRPVESKR

SEQ ID NO: 41545 - protein, 9 aa, synthetic construct
LTPPQEMVS

SEQ ID NO: 41546 - protein, 9 aa, synthetic construct
VWYPQEHLL

SEQ ID NO: 41547 - protein, 9 aa, synthetic construct
DRVPRELWS

SEQ ID NO: 41548 - protein, 9 aa, synthetic construct
HTHPHENPY

SEQ ID NO: 41549 - protein, 9 aa, synthetic construct
SECPTELIA

SEQ ID NO: 41550 - protein, 9 aa, synthetic construct
ATYPHEHTS

SEQ ID NO: 41551 - protein, 9 aa, synthetic construct
CQGPNEQLP

SEQ ID NO: 41552 - protein, 9 aa, synthetic construct
SLTPFESQK

SEQ ID NO: 41553 - protein, 9 aa, synthetic construct
WAMPGEIFL

SEQ ID NO: 41554 - protein, 9 aa, synthetic construct
AMPPHEPIS

SEQ ID NO: 41555 - protein, 9 aa, synthetic construct
YMSPDEGRS

SEQ ID NO: 41556 - protein, 9 aa, synthetic construct
PPPPPEPTR

SEQ ID NO: 41557 - protein, 9 aa, synthetic construct
NMLPVELKS

SEQ ID NO: 41558 - protein, 9 aa, synthetic construct
RFTPSEDTF

SEQ ID NO: 41559 - protein, 9 aa, synthetic construct
GDGPFEKGR

SEQ ID NO: 41560 - protein, 9 aa, synthetic construct
YSPPTERND

SEQ ID NO: 41561 - protein, 9 aa, synthetic construct
PPPPTEQPP

SEQ ID NO: 41562 - protein, 9 aa, synthetic construct
SLLPTEPPT

SEQ ID NO: 41563 - protein, 9 aa, synthetic construct
RRPPTEFGE

SEQ ID NO: 41564 - protein, 9 aa, synthetic construct
CHAPQEFRH

SEQ ID NO: 41565 - protein, 9 aa, synthetic construct
HWKPFENQI

SEQ ID NO: 41566 - protein, 9 aa, synthetic construct
ATPPTEYSL

SEQ ID NO: 41567 - protein, 9 aa, synthetic construct
INQPMECYS

SEQ ID NO: 41568 - protein, 9 aa, synthetic construct
YDLPLELHA

SEQ ID NO: 41569 - protein, 9 aa, synthetic construct
HVRPLEVFH

SEQ ID NO: 41570 - protein, 9 aa, synthetic construct
AAMPGEFLR

SEQ ID NO: 41571 - protein, 9 aa, synthetic construct
PLRPDEKDG

SEQ ID NO: 41572 - protein, 9 aa, synthetic construct
SGTPNETPY

SEQ ID NO: 41573 - protein, 9 aa, synthetic construct
MLYPPEPLT

SEQ ID NO: 41574 - protein, 9 aa, synthetic construct
DPRPGEDCT

SEQ ID NO: 41575 - protein, 9 aa, synthetic construct
EEFPLEYAK

SEQ ID NO: 41576 - protein, 9 aa, synthetic construct
PMLPYEWNY

SEQ ID NO: 41577 - protein, 9 aa, synthetic construct
SPFPLETYI

SEQ ID NO: 41578 - protein, 9 aa, synthetic construct
KPQPPETTT

SEQ ID NO: 41579 - protein, 9 aa, synthetic construct
VRHPLEQMA

SEQ ID NO: 41580 - protein, 9 aa, synthetic construct
VRPPLEPRV

SEQ ID NO: 41581 - protein, 9 aa, synthetic construct
LPSPDELPT

SEQ ID NO: 41582 - protein, 9 aa, synthetic construct
IPNPPEQLT

SEQ ID NO: 41583 - protein, 9 aa, synthetic construct
LTHPLEYQL

SEQ ID NO: 41584 - protein, 9 aa, synthetic construct
AAQPLEAPI

SEQ ID NO: 41585 - protein, 9 aa, synthetic construct
QRPPTEKPY

SEQ ID NO: 41586 - protein, 9 aa, synthetic construct
RGFPGENWP

SEQ ID NO: 41587 - protein, 9 aa, synthetic construct
HTYPGEAFV

SEQ ID NO: 41588 - protein, 9 aa, synthetic construct
ETCPGESTM

SEQ ID NO: 41589 - protein, 9 aa, synthetic construct
ALKPCEDHD

SEQ ID NO: 41590 - protein, 9 aa, synthetic construct
VSAPSEHPL

SEQ ID NO: 41591 - protein, 9 aa, synthetic construct
SPTPLESAN

SEQ ID NO: 41592 - protein, 9 aa, synthetic construct
SPAPAEQTY

SEQ ID NO: 41593 - protein, 9 aa, synthetic construct
CTVPSEQQC

SEQ ID NO: 41594 - protein, 9 aa, synthetic construct
EYDPPERFP

SEQ ID NO: 41595 - protein, 9 aa, synthetic construct
KTKPEEPSF

SEQ ID NO: 41596 - protein, 9 aa, synthetic construct
LTTPMEPRK

SEQ ID NO: 41597 - protein, 9 aa, synthetic construct
WVHPHEKNL

SEQ ID NO: 41598 - protein, 9 aa, synthetic construct
HPAPLEGTY

SEQ ID NO: 41599 - protein, 9 aa, synthetic construct
LTPPAESHT

SEQ ID NO: 41600 - protein, 9 aa, synthetic construct
PMLPLELYH

SEQ ID NO: 41601 - protein, 9 aa, synthetic construct
PLFPLEFLF

SEQ ID NO: 41602 - protein, 9 aa, synthetic construct
TKTPSEHPL

SEQ ID NO: 41603 - protein, 9 aa, synthetic construct
VEPPREALT

SEQ ID NO: 41604 - protein, 9 aa, synthetic construct
LNVPREPDA

SEQ ID NO: 41605 - protein, 9 aa, synthetic construct
PVTPSEYLY

SEQ ID NO: 41606 - protein, 9 aa, synthetic construct
DDKPSEFYY

SEQ ID NO: 41607 - protein, 9 aa, synthetic construct
MTPPQELVW

SEQ ID NO: 41608 - protein, 9 aa, synthetic construct
CFTPMEFAN

SEQ ID NO: 41609 - protein, 9 aa, synthetic construct
HFDPPELIP

SEQ ID NO: 41610 - protein, 9 aa, synthetic construct
HITPLEHIP

SEQ ID NO: 41611 - protein, 9 aa, synthetic construct
LLKPSEDVF

SEQ ID NO: 41612 - protein, 9 aa, synthetic construct
RASPQERTS

SEQ ID NO: 41613 - protein, 9 aa, synthetic construct
LSLPYEMWP

SEQ ID NO: 41614 - protein, 9 aa, synthetic construct
NYPPAENTR

SEQ ID NO: 41615 - protein, 9 aa, synthetic construct
SPKPLETPN

SEQ ID NO: 41616 - protein, 9 aa, synthetic construct
HTVPLEKGL

SEQ ID NO: 41617 - protein, 9 aa, synthetic construct
LFMPPEHGL

SEQ ID NO: 41618 - protein, 9 aa, synthetic construct
QAIPFEYHI

SEQ ID NO: 41619 - protein, 9 aa, synthetic construct
FYRPMENQI

SEQ ID NO: 41620 - protein, 9 aa, synthetic construct
FVMPSEHTP

SEQ ID NO: 41621 - protein, 9 aa, synthetic construct
ECDPQELMK

SEQ ID NO: 41622 - protein, 9 aa, synthetic construct
LPPPPESTW

SEQ ID NO: 41623 - protein, 9 aa, synthetic construct
WRQPTEIVY

SEQ ID NO: 41624 - protein, 9 aa, synthetic construct
PNWPPEESP

SEQ ID NO: 41625 - protein, 9 aa, synthetic construct
SWCPMEYDC

SEQ ID NO: 41626 - protein, 9 aa, synthetic construct
EKSPCEILS

SEQ ID NO: 41627 - protein, 9 aa, synthetic construct
DFLPLESGS

SEQ ID NO: 41628 - protein, 9 aa, synthetic construct
TETPEEPPV

SEQ ID NO: 41629 - protein, 9 aa, synthetic construct
PLLPTEAEY

SEQ ID NO: 41630 - protein, 9 aa, synthetic construct
AELPLEDPS

SEQ ID NO: 41631 - protein, 9 aa, synthetic construct
SLTPSENSP

SEQ ID NO: 41632 - protein, 9 aa, synthetic construct
TNEPDEQPS

SEQ ID NO: 41633 - protein, 9 aa, synthetic construct
VLSPKEWLQ

SEQ ID NO: 41634 - protein, 9 aa, synthetic construct
FSAPGESMY

SEQ ID NO: 41635 - protein, 9 aa, synthetic construct
LKDPEELSF

SEQ ID NO: 41636 - protein, 9 aa, synthetic construct
TASPRENIP

SEQ ID NO: 41637 - protein, 9 aa, synthetic construct
QHPPIENHI

SEQ ID NO: 41638 - protein, 9 aa, synthetic construct
YELPLEYRT

SEQ ID NO: 41639 - protein, 9 aa, synthetic construct
AQNPKEGQV

SEQ ID NO: 41640 - protein, 9 aa, synthetic construct
VKDPLEALP

SEQ ID NO: 41641 - protein, 9 aa, synthetic construct
QMGPFENDA

SEQ ID NO: 41642 - protein, 9 aa, synthetic construct
HPLPIEPPS

SEQ ID NO: 41643 - protein, 9 aa, synthetic construct
HLRPEEYDA

SEQ ID NO: 41644 - protein, 9 aa, synthetic construct
IHKPIEALS

SEQ ID NO: 41645 - protein, 9 aa, synthetic construct
LLDPEENHL

SEQ ID NO: 41646 - protein, 9 aa, synthetic construct
SKTPLERCN

SEQ ID NO: 41647 - protein, 9 aa, synthetic construct
NRRPSEGVT

SEQ ID NO: 41648 - protein, 9 aa, synthetic construct
ANLPCENPM

SEQ ID NO: 41649 - protein, 9 aa, synthetic construct
GAPPMEALL

SEQ ID NO: 41650 - protein, 9 aa, synthetic construct
WWRPHEVFI

SEQ ID NO: 41651 - protein, 9 aa, synthetic construct
AHLPREGDI

SEQ ID NO: 41652 - protein, 9 aa, synthetic construct
LEKPAENYE

SEQ ID NO: 41653 - protein, 9 aa, synthetic construct
HCTPCEPHI

SEQ ID NO: 41654 - protein, 9 aa, synthetic construct
NVSPSEGRG

SEQ ID NO: 41655 - protein, 9 aa, synthetic construct
LIVPAEYSR

SEQ ID NO: 41656 - protein, 9 aa, synthetic construct
TRSPAENQM

SEQ ID NO: 41657 - protein, 9 aa, synthetic construct
PCPPDEITS

SEQ ID NO: 41658 - protein, 9 aa, synthetic construct
AYLPAETLE

SEQ ID NO: 41659 - protein, 9 aa, synthetic construct
DPKPQESIP

SEQ ID NO: 41660 - protein, 9 aa, synthetic construct
FVPPREERT

SEQ ID NO: 41661 - protein, 9 aa, synthetic construct
LDRPYEMLI

SEQ ID NO: 41662 - protein, 9 aa, synthetic construct
LPSPPEIYS

SEQ ID NO: 41663 - protein, 9 aa, synthetic construct
WNTPEECGK

SEQ ID NO: 41664 - protein, 9 aa, synthetic construct
DLLPMESQL

SEQ ID NO: 41665 - protein, 9 aa, synthetic construct
LYTPSEGGP

SEQ ID NO: 41666 - protein, 9 aa, synthetic construct
MMLPHEGES

SEQ ID NO: 41667 - protein, 9 aa, synthetic construct
SLDPYEEVR

SEQ ID NO: 41668 - protein, 9 aa, synthetic construct
RFNPQEPYM

SEQ ID NO: 41669 - protein, 9 aa, synthetic construct
PPSPLETQH

SEQ ID NO: 41670 - protein, 9 aa, synthetic construct
PPPPLESCP

SEQ ID NO: 41671 - protein, 9 aa, synthetic construct
INMPRESSP

SEQ ID NO: 41672 - protein, 9 aa, synthetic construct
WYDPSENRR

SEQ ID NO: 41673 - protein, 9 aa, synthetic construct
PHIPKESHQ

SEQ ID NO: 41674 - protein, 9 aa, synthetic construct
TTNPWENPY

SEQ ID NO: 41675 - protein, 9 aa, synthetic construct
LYRPSEWFR

SEQ ID NO: 41676 - protein, 9 aa, synthetic construct
KPFPLESTK

SEQ ID NO: 41677 - protein, 9 aa, synthetic construct
HSGPLENYD

SEQ ID NO: 41678 - protein, 9 aa, synthetic construct
HVSPPELYS

SEQ ID NO: 41679 - protein, 9 aa, synthetic construct
LPMPFEKLT

SEQ ID NO: 41680 - protein, 9 aa, synthetic construct
DGPPWEQTY

SEQ ID NO: 41681 - protein, 9 aa, synthetic construct
CVCPPESPW

SEQ ID NO: 41682 - protein, 9 aa, synthetic construct
SNAPVEVNA

SEQ ID NO: 41683 - protein, 9 aa, synthetic construct
VPLPVEPVE

SEQ ID NO: 41684 - protein, 9 aa, synthetic construct
QLNPDEFPT

SEQ ID NO: 41685 - protein, 9 aa, synthetic construct
QSLPAETTQ

SEQ ID NO: 41686 - protein, 9 aa, synthetic construct
SLNPEEMYK

SEQ ID NO: 41687 - protein, 9 aa, synthetic construct
TRAPTEFLH

SEQ ID NO: 41688 - protein, 9 aa, synthetic construct
LAMPGEFRG

SEQ ID NO: 41689 - protein, 9 aa, synthetic construct
APGPNETRT

SEQ ID NO: 41690 - protein, 9 aa, synthetic construct
GDNPQESPV

SEQ ID NO: 41691 - protein, 9 aa, synthetic construct
ELRPSEYLC

SEQ ID NO: 41692 - protein, 9 aa, synthetic construct
SITPQEFSD

SEQ ID NO: 41693 - protein, 9 aa, synthetic construct
LLMPRENIE

SEQ ID NO: 41694 - protein, 9 aa, synthetic construct
RNDPGETHT

SEQ ID NO: 41695 - protein, 9 aa, synthetic construct
SWMPPEPNH

SEQ ID NO: 41696 - protein, 9 aa, synthetic construct
RATPPEVLF

SEQ ID NO: 41697 - protein, 9 aa, synthetic construct
QLFPQEITS

SEQ ID NO: 41698 - protein, 9 aa, synthetic construct
GVAPWEASL

SEQ ID NO: 41699 - protein, 9 aa, synthetic construct
GSTPTEEEG

SEQ ID NO: 41700 - protein, 9 aa, synthetic construct
SNSPAENFN

SEQ ID NO: 41701 - protein, 9 aa, synthetic construct
NYHPSESGA

SEQ ID NO: 41702 - protein, 9 aa, synthetic construct
EWTPTEKWY

SEQ ID NO: 41703 - protein, 9 aa, synthetic construct
MSRPQEVLV

SEQ ID NO: 41704 - protein, 9 aa, synthetic construct
FGIPHEGGG

SEQ ID NO: 41705 - protein, 9 aa, synthetic construct
SINPYESDF

SEQ ID NO: 41706 - protein, 9 aa, synthetic construct
SKMPPEARS

SEQ ID NO: 41707 - protein, 9 aa, synthetic construct
YPMPLETMS

SEQ ID NO: 41708 - protein, 9 aa, synthetic construct
KLMPKEGGT

SEQ ID NO: 41709 - protein, 9 aa, synthetic construct
WKCPLEAHI

SEQ ID NO: 41710 - protein, 9 aa, synthetic construct
LIDPGELSK

SEQ ID NO: 41711 - protein, 9 aa, synthetic construct
HLMPHEVNT

SEQ ID NO: 41712 - protein, 9 aa, synthetic construct
TGYPLEIHP

SEQ ID NO: 41713 - protein, 9 aa, synthetic construct
LTPPTESIT

SEQ ID NO: 41714 - protein, 9 aa, synthetic construct
INFPHELMG

SEQ ID NO: 41715 - protein, 9 aa, synthetic construct
YKMPVEPVS

SEQ ID NO: 41716 - protein, 9 aa, synthetic construct
TNSPDERMD

SEQ ID NO: 41717 - protein, 9 aa, synthetic construct
PQLPMETNV

SEQ ID NO: 41718 - protein, 9 aa, synthetic construct
TQAPPERLN

SEQ ID NO: 41719 - protein, 9 aa, synthetic construct
LLLPFESKL

SEQ ID NO: 41720 - protein, 9 aa, synthetic construct
FGNPKETWH

SEQ ID NO: 41721 - protein, 9 aa, synthetic construct
LQTPSENNY

SEQ ID NO: 41722 - protein, 9 aa, synthetic construct
TTNPREYKT

SEQ ID NO: 41723 - protein, 9 aa, synthetic construct
MTRPTESGV

SEQ ID NO: 41724 - protein, 9 aa, synthetic construct
ALHPYEFQL

SEQ ID NO: 41725 - protein, 9 aa, synthetic construct
NDCPKEHDE

SEQ ID NO: 41726 - protein, 9 aa, synthetic construct
TLRPNETVP

SEQ ID NO: 41727 - protein, 9 aa, synthetic construct
LTNPVEHLN

SEQ ID NO: 41728 - protein, 9 aa, synthetic construct
LDHPVESSI

SEQ ID NO: 41729 - protein, 9 aa, synthetic construct
CRGPLEMDH

SEQ ID NO: 41730 - protein, 9 aa, synthetic construct
LLKPHEDDF

SEQ ID NO: 41731 - protein, 9 aa, synthetic construct
YNRPTEPPI

SEQ ID NO: 41732 - protein, 9 aa, synthetic construct
WRMPSEAMH

SEQ ID NO: 41733 - protein, 9 aa, synthetic construct
HQSPFEFHN

SEQ ID NO: 41734 - protein, 9 aa, synthetic construct
MWAPAEMRN

SEQ ID NO: 41735 - protein, 9 aa, synthetic construct
SSLPSEYNK

SEQ ID NO: 41736 - protein, 9 aa, synthetic construct
SPNPPEMRS

SEQ ID NO: 41737 - protein, 9 aa, synthetic construct
SMSPPETKR

SEQ ID NO: 41738 - protein, 9 aa, synthetic construct
GAHPGEVGY

SEQ ID NO: 41739 - protein, 9 aa, synthetic construct
FKSPIEDGV

SEQ ID NO: 41740 - protein, 9 aa, synthetic construct
ANMPTEDIE

SEQ ID NO: 41741 - protein, 9 aa, synthetic construct
YYLPGEWSK

SEQ ID NO: 41742 - protein, 9 aa, synthetic construct
TGIPTERLR

SEQ ID NO: 41743 - protein, 9 aa, synthetic construct
TAYPSEHGF

SEQ ID NO: 41744 - protein, 9 aa, synthetic construct
KNYPQEWSN

SEQ ID NO: 41745 - protein, 9 aa, synthetic construct
RTSPDESNG

SEQ ID NO: 41746 - protein, 9 aa, synthetic construct
EVPPFENHN

SEQ ID NO: 41747 - protein, 9 aa, synthetic construct
LTHPVEGHA

SEQ ID NO: 41748 - protein, 9 aa, synthetic construct
VPLPREFVR

SEQ ID NO: 41749 - protein, 9 aa, synthetic construct
YLSPREIHR

SEQ ID NO: 41750 - protein, 9 aa, synthetic construct
TNHPRETVQ

SEQ ID NO: 41751 - protein, 9 aa, synthetic construct
SKSPMEEHN

SEQ ID NO: 41752 - protein, 9 aa, synthetic construct
LTVPSESSN

SEQ ID NO: 41753 - protein, 9 aa, synthetic construct
KSNPRELSR

SEQ ID NO: 41754 - protein, 9 aa, synthetic construct
GENPRETCC

SEQ ID NO: 41755 - protein, 9 aa, synthetic construct
FSTPNEMTY

SEQ ID NO: 41756 - protein, 9 aa, synthetic construct
VDNPHEAMY

SEQ ID NO: 41757 - protein, 9 aa, synthetic construct
RYLPNEQLN

SEQ ID NO: 41758 - protein, 9 aa, synthetic construct
VHHPVEIET

SEQ ID NO: 41759 - protein, 9 aa, synthetic construct
IYSPAESRS

SEQ ID NO: 41760 - protein, 9 aa, synthetic construct
SKPPREAPS

SEQ ID NO: 41761 - protein, 9 aa, synthetic construct
SHWPSENVP

SEQ ID NO: 41762 - protein, 9 aa, synthetic construct
MNLPPETVN

SEQ ID NO: 41763 - protein, 9 aa, synthetic construct
VGHPLEWDS

SEQ ID NO: 41764 - protein, 9 aa, synthetic construct
ESLPTESYM

SEQ ID NO: 41765 - protein, 9 aa, synthetic construct
TIPPEELKM

SEQ ID NO: 41766 - protein, 9 aa, synthetic construct
RNWPHETSD

SEQ ID NO: 41767 - protein, 9 aa, synthetic construct
TWQPTEPLQ

SEQ ID NO: 41768 - protein, 9 aa, synthetic construct
GFNPSEGKY

SEQ ID NO: 41769 - protein, 9 aa, synthetic construct
ASCPEESKY

SEQ ID NO: 41770 - protein, 9 aa, synthetic construct
CGCPKETIE

SEQ ID NO: 41771 - protein, 9 aa, synthetic construct
HLLPPENRS

SEQ ID NO: 41772 - protein, 9 aa, synthetic construct
RVAPDEHPS

SEQ ID NO: 41773 - protein, 9 aa, synthetic construct
IFRPYEYLE

SEQ ID NO: 41774 - protein, 9 aa, synthetic construct
CVTPVEKRD

SEQ ID NO: 41775 - protein, 9 aa, synthetic construct
LQPPPEPLQ

SEQ ID NO: 41776 - protein, 9 aa, synthetic construct
EYQPSEPNS

SEQ ID NO: 41777 - protein, 9 aa, synthetic construct
FYMPLEVPQ

SEQ ID NO: 41778 - protein, 9 aa, synthetic construct
LFIPLEILS

SEQ ID NO: 41779 - protein, 9 aa, synthetic construct
GFNPSEYNA

SEQ ID NO: 41780 - protein, 9 aa, synthetic construct
TPHPIETLP

SEQ ID NO: 41781 - protein, 9 aa, synthetic construct
PPHPTEHFI

SEQ ID NO: 41782 - protein, 9 aa, synthetic construct
SGNPLEMIT

SEQ ID NO: 41783 - protein, 9 aa, synthetic construct
DLDPWESLV

SEQ ID NO: 41784 - protein, 9 aa, synthetic construct
SLKPYEHLI

SEQ ID NO: 41785 - protein, 9 aa, synthetic construct
QPIPSEYPI

SEQ ID NO: 41786 - protein, 9 aa, synthetic construct
PPDPPEPMS

SEQ ID NO: 41787 - protein, 9 aa, synthetic construct
VYEPRETDY

SEQ ID NO: 41788 - protein, 9 aa, synthetic construct
GVDPHEFAR

SEQ ID NO: 41789 - protein, 9 aa, synthetic construct
TTLPDENPN

SEQ ID NO: 41790 - protein, 9 aa, synthetic construct
VRLPPEGFM

SEQ ID NO: 41791 - protein, 9 aa, synthetic construct
NATPTERLP

SEQ ID NO: 41792 - protein, 9 aa, synthetic construct
NPHPMESSK

SEQ ID NO: 41793 - protein, 9 aa, synthetic construct
TTSPTEYYG

SEQ ID NO: 41794 - protein, 9 aa, synthetic construct
HTIPPETWN

SEQ ID NO: 41795 - protein, 9 aa, synthetic construct
LRYPTEVPI

SEQ ID NO: 41796 - protein, 9 aa, synthetic construct
PAIPTERTP

SEQ ID NO: 41797 - protein, 9 aa, synthetic construct
HPMPNELSG

SEQ ID NO: 41798 - protein, 9 aa, synthetic construct
PQPPPESDK

SEQ ID NO: 41799 - protein, 9 aa, synthetic construct
SRHPAERQA

SEQ ID NO: 41800 - protein, 9 aa, synthetic construct
YFLPTEHLY

SEQ ID NO: 41801 - protein, 9 aa, synthetic construct
NKGPQERSV

SEQ ID NO: 41802 - protein, 9 aa, synthetic construct
HMNPTENVP

SEQ ID NO: 41803 - protein, 9 aa, synthetic construct
KIWPSELNL

SEQ ID NO: 41804 - protein, 9 aa, synthetic construct
HVLPLEYWK

SEQ ID NO: 41805 - protein, 9 aa, synthetic construct
VDFPVENHA

SEQ ID NO: 41806 - protein, 9 aa, synthetic construct
VEYPHESKN

SEQ ID NO: 41807 - protein, 9 aa, synthetic construct
ELVPWEHIP

SEQ ID NO: 41808 - protein, 9 aa, synthetic construct
GLRPSEYPK

SEQ ID NO: 41809 - protein, 9 aa, synthetic construct
FAPPPELTF

SEQ ID NO: 41810 - protein, 9 aa, synthetic construct
QYTPTELLL

SEQ ID NO: 41811 - protein, 9 aa, synthetic construct
SYYPKESYY

SEQ ID NO: 41812 - protein, 9 aa, synthetic construct
DLMPRETLF

SEQ ID NO: 41813 - protein, 9 aa, synthetic construct
RVLPTETII

SEQ ID NO: 41814 - protein, 9 aa, synthetic construct
KSNPGEHAM

SEQ ID NO: 41815 - protein, 9 aa, synthetic construct
RYHPTEMPL

SEQ ID NO: 41816 - protein, 9 aa, synthetic construct
LLYPTEMRS

SEQ ID NO: 41817 - protein, 9 aa, synthetic construct
NNKPHEYPN

SEQ ID NO: 41818 - protein, 9 aa, synthetic construct
SGNPPENQS

SEQ ID NO: 41819 - protein, 9 aa, synthetic construct
QTHPSEVFM

SEQ ID NO: 41820 - protein, 9 aa, synthetic construct
FSLPLELLT

SEQ ID NO: 41821 - protein, 9 aa, synthetic construct
ATCPEEYPY

SEQ ID NO: 41822 - protein, 9 aa, synthetic construct
ILDPSEPDV

SEQ ID NO: 41823 - protein, 9 aa, synthetic construct
VHPPQETTM

SEQ ID NO: 41824 - protein, 9 aa, synthetic construct
SLRPSEYSL

SEQ ID NO: 41825 - protein, 9 aa, synthetic construct
LYDPREGLT

SEQ ID NO: 41826 - protein, 9 aa, synthetic construct
LHAPNEMTD

SEQ ID NO: 41827 - protein, 9 aa, synthetic construct
DSLPSEAAM

SEQ ID NO: 41828 - protein, 9 aa, synthetic construct
RPWPHESLP

SEQ ID NO: 41829 - protein, 9 aa, synthetic construct
QSSPFEIPL

SEQ ID NO: 41830 - protein, 9 aa, synthetic construct
LLMPTETTM

SEQ ID NO: 41831 - protein, 9 aa, synthetic construct
LHYPRETSS

SEQ ID NO: 41832 - protein, 9 aa, synthetic construct
SGFPNEDAA

SEQ ID NO: 41833 - protein, 9 aa, synthetic construct
LIYPNEQMT

SEQ ID NO: 41834 - protein, 9 aa, synthetic construct
KARPIESYR

SEQ ID NO: 41835 - protein, 9 aa, synthetic construct
PWNPEEGTL

SEQ ID NO: 41836 - protein, 9 aa, synthetic construct
ALDPIESQR

SEQ ID NO: 41837 - protein, 9 aa, synthetic construct
LNMPYENEV

SEQ ID NO: 41838 - protein, 9 aa, synthetic construct
RMPPEEPNT

SEQ ID NO: 41839 - protein, 9 aa, synthetic construct
YILPSEMNK

SEQ ID NO: 41840 - protein, 9 aa, synthetic construct
HRIPSERTY

SEQ ID NO: 41841 - protein, 9 aa, synthetic construct
EISPYERCT

SEQ ID NO: 41842 - protein, 9 aa, synthetic construct
ISTPLETHS

SEQ ID NO: 41843 - protein, 9 aa, synthetic construct
KTYPDEVQL

SEQ ID NO: 41844 - protein, 9 aa, synthetic construct
TNLPYEDPL

SEQ ID NO: 41845 - protein, 9 aa, synthetic construct
GRTPAEVAS

SEQ ID NO: 41846 - protein, 9 aa, synthetic construct
FFAPNEPKL

SEQ ID NO: 41847 - protein, 9 aa, synthetic construct
TSFPDEPTH

SEQ ID NO: 41848 - protein, 9 aa, synthetic construct
AFHPFENHR

SEQ ID NO: 41849 - protein, 9 aa, synthetic construct
LNYPYESVR

SEQ ID NO: 41850 - protein, 9 aa, synthetic construct
EVLPKEVIN

SEQ ID NO: 41851 - protein, 9 aa, synthetic construct
EQDPSELPY

SEQ ID NO: 41852 - protein, 9 aa, synthetic construct
YCWPAETFT

SEQ ID NO: 41853 - protein, 9 aa, synthetic construct
FFRPIEFVD

SEQ ID NO: 41854 - protein, 9 aa, synthetic construct
VRDPCEYMA

SEQ ID NO: 41855 - protein, 9 aa, synthetic construct
NYRPIESLT

SEQ ID NO: 41856 - protein, 9 aa, synthetic construct
QSRPRECTS

SEQ ID NO: 41857 - protein, 9 aa, synthetic construct
DTVPDEALL

SEQ ID NO: 41858 - protein, 9 aa, synthetic construct
CEMPCETWE

SEQ ID NO: 41859 - protein, 9 aa, synthetic construct
TTPPYEFSI

SEQ ID NO: 41860 - protein, 9 aa, synthetic construct
IVSPHETDH

SEQ ID NO: 41861 - protein, 9 aa, synthetic construct
LRLPYENLS

SEQ ID NO: 41862 - protein, 9 aa, synthetic construct
TNLPSETKY

SEQ ID NO: 41863 - protein, 9 aa, synthetic construct
IVIPEEMGT

SEQ ID NO: 41864 - protein, 9 aa, synthetic construct
SVLPHEPPD

SEQ ID NO: 41865 - protein, 9 aa, synthetic construct
LPPPPEPTS

SEQ ID NO: 41866 - protein, 9 aa, synthetic construct
TVAPTEHHS

SEQ ID NO: 41867 - protein, 9 aa, synthetic construct
MVSPPESYS

SEQ ID NO: 41868 - protein, 9 aa, synthetic construct
YTKPHEHTI

SEQ ID NO: 41869 - protein, 9 aa, synthetic construct
LAHPSETLL

SEQ ID NO: 41870 - protein, 9 aa, synthetic construct
RDVPKEKIN

SEQ ID NO: 41871 - protein, 9 aa, synthetic construct
EAIPRELTL

SEQ ID NO: 41872 - protein, 9 aa, synthetic construct
SIVPFELNI

SEQ ID NO: 41873 - protein, 9 aa, synthetic construct
LASPLEFHF

SEQ ID NO: 41874 - protein, 9 aa, synthetic construct
TLQPTERVY

SEQ ID NO: 41875 - protein, 9 aa, synthetic construct
LLSPIEPQF

SEQ ID NO: 41876 - protein, 9 aa, synthetic construct
RNLPTEKIA

SEQ ID NO: 41877 - protein, 9 aa, synthetic construct
FHSPPETYK

SEQ ID NO: 41878 - protein, 9 aa, synthetic construct
HMTPFENRN

SEQ ID NO: 41879 - protein, 9 aa, synthetic construct
SGYPMETTI

SEQ ID NO: 41880 - protein, 9 aa, synthetic construct
QQYPNESHY

SEQ ID NO: 41881 - protein, 9 aa, synthetic construct
NEMPPEPPR

SEQ ID NO: 41882 - protein, 9 aa, synthetic construct
TNRPHELSM

SEQ ID NO: 41883 - protein, 9 aa, synthetic construct
ICKPCESVK

SEQ ID NO: 41884 - protein, 9 aa, synthetic construct
MALPGEVTH

SEQ ID NO: 41885 - protein, 9 aa, synthetic construct
YYNPYEFNK

SEQ ID NO: 41886 - protein, 9 aa, synthetic construct
IPAPEEFPS

SEQ ID NO: 41887 - protein, 9 aa, synthetic construct
TLMPYEDYL

SEQ ID NO: 41888 - protein, 9 aa, synthetic construct
SVYPSEVIT

SEQ ID NO: 41889 - protein, 9 aa, synthetic construct
FNSPDERWY

SEQ ID NO: 41890 - protein, 9 aa, synthetic construct
SGKPGEMKA

SEQ ID NO: 41891 - protein, 9 aa, synthetic construct
FCTPTEHCV

SEQ ID NO: 41892 - protein, 9 aa, synthetic construct
FTAPSESQR

SEQ ID NO: 41893 - protein, 9 aa, synthetic construct
TPSPNEISP

SEQ ID NO: 41894 - protein, 9 aa, synthetic construct
LPKPFELAY

SEQ ID NO: 41895 - protein, 9 aa, synthetic construct
TPQPTERSN

SEQ ID NO: 41896 - protein, 9 aa, synthetic construct
GTIPVERLP

SEQ ID NO: 41897 - protein, 9 aa, synthetic construct
WYYPHELNH

SEQ ID NO: 41898 - protein, 9 aa, synthetic construct
ETMPLEVNN

SEQ ID NO: 41899 - protein, 9 aa, synthetic construct
IMHPNETLD

SEQ ID NO: 41900 - protein, 9 aa, synthetic construct
YSPPTELTF

SEQ ID NO: 41901 - protein, 9 aa, synthetic construct
GVRPKEIIR

SEQ ID NO: 41902 - protein, 9 aa, synthetic construct
NPHPTELGL

SEQ ID NO: 41903 - protein, 9 aa, synthetic construct
KMLPLEWLM

SEQ ID NO: 41904 - protein, 9 aa, synthetic construct
RSSPRELSR

SEQ ID NO: 41905 - protein, 9 aa, synthetic construct
YDFPLELSV

SEQ ID NO: 41906 - protein, 9 aa, synthetic construct
SLTPPESTL

SEQ ID NO: 41907 - protein, 9 aa, synthetic construct
TLYPAEHLD

SEQ ID NO: 41908 - protein, 9 aa, synthetic construct
YYVPPELMP

SEQ ID NO: 41909 - protein, 9 aa, synthetic construct
TEDPHELMK

SEQ ID NO: 41910 - protein, 9 aa, synthetic construct
SRNPSEPEN

SEQ ID NO: 41911 - protein, 9 aa, synthetic construct
VLHPMENII

SEQ ID NO: 41912 - protein, 9 aa, synthetic construct
WHLPIEPLI

SEQ ID NO: 41913 - protein, 9 aa, synthetic construct
NDPPQEYTQ

SEQ ID NO: 41914 - protein, 9 aa, synthetic construct
CIPPLESPL

SEQ ID NO: 41915 - protein, 9 aa, synthetic construct
CLSPTELTD

SEQ ID NO: 41916 - protein, 9 aa, synthetic construct
RIVPGELLI

SEQ ID NO: 41917 - protein, 9 aa, synthetic construct
ENVPHEAQS

SEQ ID NO: 41918 - protein, 9 aa, synthetic construct
ITTPWERFN

SEQ ID NO: 41919 - protein, 9 aa, synthetic construct
MMLPKEIRH

SEQ ID NO: 41920 - protein, 9 aa, synthetic construct
PSNPGEPMT

SEQ ID NO: 41921 - protein, 9 aa, synthetic construct
VPTPEELGV

SEQ ID NO: 41922 - protein, 9 aa, synthetic construct
CSEPREIPD

SEQ ID NO: 41923 - protein, 9 aa, synthetic construct
IPTPEEVTT

SEQ ID NO: 41924 - protein, 9 aa, synthetic construct
NNLPNESYS

SEQ ID NO: 41925 - protein, 9 aa, synthetic construct
NYQPTEESS

SEQ ID NO: 41926 - protein, 9 aa, synthetic construct
NKYPSEFHP

SEQ ID NO: 41927 - protein, 9 aa, synthetic construct
HRHPSEFHS

SEQ ID NO: 41928 - protein, 9 aa, synthetic construct
KLTPPERKT

SEQ ID NO: 41929 - protein, 9 aa, synthetic construct
VNNPSESSR

SEQ ID NO: 41930 - protein, 9 aa, synthetic construct
QQLPEEYFD

SEQ ID NO: 41931 - protein, 9 aa, synthetic construct
LKAPTESNV

SEQ ID NO: 41932 - protein, 9 aa, synthetic construct
TIVPIETEH

SEQ ID NO: 41933 - protein, 9 aa, synthetic construct
MRAPSEGLN

SEQ ID NO: 41934 - protein, 9 aa, synthetic construct
SALPREDLG

SEQ ID NO: 41935 - protein, 9 aa, synthetic construct
PSEPKEYGN

SEQ ID NO: 41936 - protein, 9 aa, synthetic construct
ESYPHESLT

SEQ ID NO: 41937 - protein, 9 aa, synthetic construct
RNLPGEISY

SEQ ID NO: 41938 - protein, 9 aa, synthetic construct
FTFPSELSK

SEQ ID NO: 41939 - protein, 9 aa, synthetic construct
IKSPAEITQ

SEQ ID NO: 41940 - protein, 9 aa, synthetic construct
NDRPEEIYN

SEQ ID NO: 41941 - protein, 9 aa, synthetic construct
DLDPTEHHM

SEQ ID NO: 41942 - protein, 9 aa, synthetic construct
IHRPKEYIL

SEQ ID NO: 41943 - protein, 9 aa, synthetic construct
LISPAEKAP

SEQ ID NO: 41944 - protein, 9 aa, synthetic construct
EIFPGEFKF

SEQ ID NO: 41945 - protein, 9 aa, synthetic construct
NQKPDEWRS

SEQ ID NO: 41946 - protein, 9 aa, synthetic construct
FLVPIETMF

SEQ ID NO: 41947 - protein, 9 aa, synthetic construct
DCYPGESTD

SEQ ID NO: 41948 - protein, 9 aa, synthetic construct
AAHPQESSD

SEQ ID NO: 41949 - protein, 9 aa, synthetic construct
NRPPPEVNG

SEQ ID NO: 41950 - protein, 9 aa, synthetic construct
TRFPKEMMS

SEQ ID NO: 41951 - protein, 9 aa, synthetic construct
KLAPPELMW

SEQ ID NO: 41952 - protein, 9 aa, synthetic construct
AMNPSEREA

SEQ ID NO: 41953 - protein, 9 aa, synthetic construct
LDKPYETTA

SEQ ID NO: 41954 - protein, 9 aa, synthetic construct
LVVPNEDVN

SEQ ID NO: 41955 - protein, 9 aa, synthetic construct
IVMPFEVFF

SEQ ID NO: 41956 - protein, 9 aa, synthetic construct
YLPPCELYL

SEQ ID NO: 41957 - protein, 9 aa, synthetic construct
IGMPTELHT

SEQ ID NO: 41958 - protein, 9 aa, synthetic construct
YRSPFETMQ

SEQ ID NO: 41959 - protein, 9 aa, synthetic construct
WPVPSESPV

SEQ ID NO: 41960 - protein, 9 aa, synthetic construct
CISPTESSR

SEQ ID NO: 41961 - protein, 9 aa, synthetic construct
NNIPAELFA

SEQ ID NO: 41962 - protein, 9 aa, synthetic construct
DTLPIESQN

SEQ ID NO: 41963 - protein, 9 aa, synthetic construct
MNIPNETTK

SEQ ID NO: 41964 - protein, 9 aa, synthetic construct
LDSPTEPFK

SEQ ID NO: 41965 - protein, 9 aa, synthetic construct
LKMPHEFGV

SEQ ID NO: 41966 - protein, 9 aa, synthetic construct
VFDPPERSR

SEQ ID NO: 41967 - protein, 9 aa, synthetic construct
IFCPREDHT

SEQ ID NO: 41968 - protein, 9 aa, synthetic construct
ITVPREISS

SEQ ID NO: 41969 - protein, 9 aa, synthetic construct
TTDPAEYAG

SEQ ID NO: 41970 - protein, 9 aa, synthetic construct
TYSPKETLC

SEQ ID NO: 41971 - protein, 9 aa, synthetic construct
VIVPNEEFL

SEQ ID NO: 41972 - protein, 9 aa, synthetic construct
PYDPGESLH

SEQ ID NO: 41973 - protein, 9 aa, synthetic construct
WYQPKESVD

SEQ ID NO: 41974 - protein, 9 aa, synthetic construct
YSMPFEEHT

SEQ ID NO: 41975 - protein, 9 aa, synthetic construct
MHLPMENFP

SEQ ID NO: 41976 - protein, 9 aa, synthetic construct
YSLPYEFFL

SEQ ID NO: 41977 - protein, 9 aa, synthetic construct
DERPYENSP

SEQ ID NO: 41978 - protein, 9 aa, synthetic construct
NSCPNERLG

SEQ ID NO: 41979 - protein, 9 aa, synthetic construct
KHEPLEKMR

SEQ ID NO: 41980 - protein, 9 aa, synthetic construct
VLTPNEGFD

SEQ ID NO: 41981 - protein, 9 aa, synthetic construct
KRRPIEMPI

SEQ ID NO: 41982 - protein, 9 aa, synthetic construct
MNKPTETQA

SEQ ID NO: 41983 - protein, 9 aa, synthetic construct
KHRPTEYTL

SEQ ID NO: 41984 - protein, 9 aa, synthetic construct
IPGPEETLE

SEQ ID NO: 41985 - protein, 9 aa, synthetic construct
NGDPVEVCV

SEQ ID NO: 41986 - protein, 9 aa, synthetic construct
KDLPHEIYL

SEQ ID NO: 41987 - protein, 9 aa, synthetic construct
TTFPREKHS

SEQ ID NO: 41988 - protein, 9 aa, synthetic construct
TPPPPEAPT

SEQ ID NO: 41989 - protein, 9 aa, synthetic construct
ILPPKELTA

SEQ ID NO: 41990 - protein, 9 aa, synthetic construct
LTAPLEPVH

SEQ ID NO: 41991 - protein, 9 aa, synthetic construct
EFKPYERFL

SEQ ID NO: 41992 - protein, 9 aa, synthetic construct
WTKPYEFSG

SEQ ID NO: 41993 - protein, 9 aa, synthetic construct
CSHPFEAMQ

SEQ ID NO: 41994 - protein, 9 aa, synthetic construct
IVLPGEHNR

SEQ ID NO: 41995 - protein, 9 aa, synthetic construct
IIKPLEYSH

SEQ ID NO: 41996 - protein, 9 aa, synthetic construct
KQSPAEPLY

SEQ ID NO: 41997 - protein, 9 aa, synthetic construct
NIMPEEPVN

SEQ ID NO: 41998 - protein, 9 aa, synthetic construct
CVIPPENDK

SEQ ID NO: 41999 - protein, 9 aa, synthetic construct
NKSPTEVLS

SEQ ID NO: 42000 - protein, 9 aa, synthetic construct
PWVPIELPN

SEQ ID NO: 42001 - protein, 9 aa, synthetic construct
TDPPKESDY

SEQ ID NO: 42002 - protein, 9 aa, synthetic construct
LKSPSELLT

SEQ ID NO: 42003 - protein, 9 aa, synthetic construct
FVAPHEVYY

SEQ ID NO: 42004 - protein, 9 aa, synthetic construct
YALPNEVPT

SEQ ID NO: 42005 - protein, 9 aa, synthetic construct
SDPPSERIR

SEQ ID NO: 42006 - protein, 9 aa, synthetic construct
FSKPFEANP

SEQ ID NO: 42007 - protein, 9 aa, synthetic construct
IFEPHEFFM

SEQ ID NO: 42008 - protein, 9 aa, synthetic construct
NNRPDELSP

SEQ ID NO: 42009 - protein, 9 aa, synthetic construct
KHTPCEIQD

SEQ ID NO: 42010 - protein, 9 aa, synthetic construct
NTWPYELLE

SEQ ID NO: 42011 - protein, 9 aa, synthetic construct
NTEPLEATI

SEQ ID NO: 42012 - protein, 9 aa, synthetic construct
IQIPAEGTR

SEQ ID NO: 42013 - protein, 9 aa, synthetic construct
FLKPVESTS

SEQ ID NO: 42014 - protein, 9 aa, synthetic construct
DNYPLEAMN

SEQ ID NO: 42015 - protein, 9 aa, synthetic construct
LPLPSEQAP

SEQ ID NO: 42016 - protein, 9 aa, synthetic construct
TPRPLEHPI

SEQ ID NO: 42017 - protein, 9 aa, synthetic construct
VANPVEMTR

SEQ ID NO: 42018 - protein, 9 aa, synthetic construct
CKHPRERCI

SEQ ID NO: 42019 - protein, 9 aa, synthetic construct
LSDPYEVTA

SEQ ID NO: 42020 - protein, 9 aa, synthetic construct
IPPPLELIK

SEQ ID NO: 42021 - protein, 9 aa, synthetic construct
ILGPEEHNS

SEQ ID NO: 42022 - protein, 9 aa, synthetic construct
IVQPFEQLP

SEQ ID NO: 42023 - protein, 9 aa, synthetic construct
WIMPHERTY

SEQ ID NO: 42024 - protein, 9 aa, synthetic construct
FYTPWEPNK

SEQ ID NO: 42025 - protein, 9 aa, synthetic construct
DLQPQESFY

SEQ ID NO: 42026 - protein, 9 aa, synthetic construct
FRMPLEVPP

SEQ ID NO: 42027 - protein, 9 aa, synthetic construct
YHLPHEKIT

SEQ ID NO: 42028 - protein, 9 aa, synthetic construct
ILHPIEMGS

SEQ ID NO: 42029 - protein, 9 aa, synthetic construct
VTCPAENRY

SEQ ID NO: 42030 - protein, 9 aa, synthetic construct
THIPKEPYL

SEQ ID NO: 42031 - protein, 9 aa, synthetic construct
WDFPYEMYK

SEQ ID NO: 42032 - protein, 9 aa, synthetic construct
QDCPCESNK

SEQ ID NO: 42033 - protein, 9 aa, synthetic construct
SNFPYEIDT

SEQ ID NO: 42034 - protein, 9 aa, synthetic construct
SLYPNEPLN

SEQ ID NO: 42035 - protein, 9 aa, synthetic construct
ITWPTEITT

SEQ ID NO: 42036 - protein, 9 aa, synthetic construct
MVTPIEMFA

SEQ ID NO: 42037 - protein, 9 aa, synthetic construct
PTNPTENGD

SEQ ID NO: 42038 - protein, 9 aa, synthetic construct
NFEPFESPG

SEQ ID NO: 42039 - protein, 9 aa, synthetic construct
IDVPVERHL

SEQ ID NO: 42040 - protein, 9 aa, synthetic construct
NRGPFELAG

SEQ ID NO: 42041 - protein, 9 aa, synthetic construct
YCNPHENST

SEQ ID NO: 42042 - protein, 9 aa, synthetic construct
TEAPHETYI

SEQ ID NO: 42043 - protein, 9 aa, synthetic construct
TECPSECPF

SEQ ID NO: 42044 - protein, 9 aa, synthetic construct
VFQPTEYDF

SEQ ID NO: 42045 - protein, 9 aa, synthetic construct
CMGPAEMWV

SEQ ID NO: 42046 - protein, 9 aa, synthetic construct
IEEPIERSH

SEQ ID NO: 42047 - protein, 9 aa, synthetic construct
SMRPMESRN

SEQ ID NO: 42048 - protein, 9 aa, synthetic construct
IYRPLEDHI

SEQ ID NO: 42049 - protein, 9 aa, synthetic construct
PPLPPEPPP

SEQ ID NO: 42050 - protein, 9 aa, synthetic construct
RVDPNERMV

SEQ ID NO: 42051 - protein, 9 aa, synthetic construct
KIHPMETSD

SEQ ID NO: 42052 - protein, 9 aa, synthetic construct
LRQPCEDNK

SEQ ID NO: 42053 - protein, 9 aa, synthetic construct
IVLPRETSG

SEQ ID NO: 42054 - protein, 9 aa, synthetic construct
DNMPYEDVH

SEQ ID NO: 42055 - protein, 9 aa, synthetic construct
NFHPLEQFF

SEQ ID NO: 42056 - protein, 9 aa, synthetic construct
KNCPREYAT

SEQ ID NO: 42057 - protein, 9 aa, synthetic construct
TNVPIEYVN

SEQ ID NO: 42058 - protein, 9 aa, synthetic construct
HDKPTEAVI

SEQ ID NO: 42059 - protein, 9 aa, synthetic construct
VLDPLEKFN

SEQ ID NO: 42060 - protein, 9 aa, synthetic construct
IIFPTEMYS

SEQ ID NO: 42061 - protein, 9 aa, synthetic construct
HRRPTEPTL

SEQ ID NO: 42062 - protein, 9 aa, synthetic construct
SITPTEPLT

SEQ ID NO: 42063 - protein, 9 aa, synthetic construct
LNEPTEGVE

SEQ ID NO: 42064 - protein, 9 aa, synthetic construct
RVEPQESRM

SEQ ID NO: 42065 - protein, 9 aa, synthetic construct
IGVPNEDLV

SEQ ID NO: 42066 - protein, 9 aa, synthetic construct
VRGPNEASS

SEQ ID NO: 42067 - protein, 9 aa, synthetic construct
QHYPNETYG

SEQ ID NO: 42068 - protein, 9 aa, synthetic construct
LPMPREKSG

SEQ ID NO: 42069 - protein, 9 aa, synthetic construct
YEKPNELRN

SEQ ID NO: 42070 - protein, 9 aa, synthetic construct
FNNPPEFSV

SEQ ID NO: 42071 - protein, 9 aa, synthetic construct
LFCPAESKV

SEQ ID NO: 42072 - protein, 9 aa, synthetic construct
NDHPLELVV

SEQ ID NO: 42073 - protein, 9 aa, synthetic construct
RYDPPENFI

SEQ ID NO: 42074 - protein, 9 aa, synthetic construct
MLIPSERNG

SEQ ID NO: 42075 - protein, 9 aa, synthetic construct
NVWPEEFLI

SEQ ID NO: 42076 - protein, 9 aa, synthetic construct
FWSPDEDDI

SEQ ID NO: 42077 - protein, 9 aa, synthetic construct
RQHPSECNC

SEQ ID NO: 42078 - protein, 9 aa, synthetic construct
ELFPIESYN

SEQ ID NO: 42079 - protein, 9 aa, synthetic construct
IVAPCESSA

SEQ ID NO: 42080 - protein, 9 aa, synthetic construct
DNRPYELWL

SEQ ID NO: 42081 - protein, 9 aa, synthetic construct
GRSPSEDSM

SEQ ID NO: 42082 - protein, 9 aa, synthetic construct
GESPPEPWS

SEQ ID NO: 42083 - protein, 9 aa, synthetic construct
NSRPFESDG

SEQ ID NO: 42084 - protein, 9 aa, synthetic construct
FRQPVETGD

SEQ ID NO: 42085 - protein, 9 aa, synthetic construct
GIDPSEATT

SEQ ID NO: 42086 - protein, 9 aa, synthetic construct
LTIPREIST

SEQ ID NO: 42087 - protein, 9 aa, synthetic construct
TYPPEEVDY

SEQ ID NO: 42088 - protein, 9 aa, synthetic construct
MPQPLESTL

SEQ ID NO: 42089 - protein, 9 aa, synthetic construct
QHWPVEHMI

SEQ ID NO: 42090 - protein, 9 aa, synthetic construct
TLRPIENNY

SEQ ID NO: 42091 - protein, 9 aa, synthetic construct
YKIPSETIR

SEQ ID NO: 42092 - protein, 9 aa, synthetic construct
YRSPTERNI

SEQ ID NO: 42093 - protein, 9 aa, synthetic construct
PSSPTERSK

SEQ ID NO: 42094 - protein, 9 aa, synthetic construct
GTGPWEILD

SEQ ID NO: 42095 - protein, 9 aa, synthetic construct
MYRPTEYGI

SEQ ID NO: 42096 - protein, 9 aa, synthetic construct
SVYPTETLR

SEQ ID NO: 42097 - protein, 9 aa, synthetic construct
NGFPMETGI

SEQ ID NO: 42098 - protein, 9 aa, synthetic construct
KIIPDETKN

SEQ ID NO: 42099 - protein, 9 aa, synthetic construct
YPHPTEQEC

SEQ ID NO: 42100 - protein, 9 aa, synthetic construct
VHNPNELIG

SEQ ID NO: 42101 - protein, 9 aa, synthetic construct
SSGPYERTV

SEQ ID NO: 42102 - protein, 9 aa, synthetic construct
ILWPFEKLT

SEQ ID NO: 42103 - protein, 9 aa, synthetic construct
DSSPGEPTF

SEQ ID NO: 42104 - protein, 9 aa, synthetic construct
EMNPNEHMD

SEQ ID NO: 42105 - protein, 9 aa, synthetic construct
VPVPSENLN

SEQ ID NO: 42106 - protein, 9 aa, synthetic construct
YENPLEMSD

SEQ ID NO: 42107 - protein, 9 aa, synthetic construct
DVWPGERLY

SEQ ID NO: 42108 - protein, 9 aa, synthetic construct
PRPPPEPPG

SEQ ID NO: 42109 - protein, 9 aa, synthetic construct
CAYPHELIK

SEQ ID NO: 42110 - protein, 9 aa, synthetic construct
THVPVELYI

SEQ ID NO: 42111 - protein, 9 aa, synthetic construct
VGTPPENTF

SEQ ID NO: 42112 - protein, 9 aa, synthetic construct
AVDPTETTQ

SEQ ID NO: 42113 - protein, 9 aa, synthetic construct
MMWPLEVLL

SEQ ID NO: 42114 - protein, 9 aa, synthetic construct
LLPPLELTS

SEQ ID NO: 42115 - protein, 9 aa, synthetic construct
SDDPSESIR

SEQ ID NO: 42116 - protein, 9 aa, synthetic construct
DVIPIEPKK

SEQ ID NO: 42117 - protein, 9 aa, synthetic construct
FWPPNEHHG

SEQ ID NO: 42118 - protein, 9 aa, synthetic construct
LSDPIERNK

SEQ ID NO: 42119 - protein, 9 aa, synthetic construct
TDNPAEYNT

SEQ ID NO: 42120 - protein, 9 aa, synthetic construct
YDLPHEYQV

SEQ ID NO: 42121 - protein, 9 aa, synthetic construct
PPQPPEPPS

SEQ ID NO: 42122 - protein, 9 aa, synthetic construct
SWLPGEGLS

SEQ ID NO: 42123 - protein, 9 aa, synthetic construct
LTTPSEVNQ

SEQ ID NO: 42124 - protein, 9 aa, synthetic construct
TAGPQEIFY

SEQ ID NO: 42125 - protein, 9 aa, synthetic construct
TEDPAEMII

SEQ ID NO: 42126 - protein, 9 aa, synthetic construct
KYRPLEIGY

SEQ ID NO: 42127 - protein, 9 aa, synthetic construct
PYIPSESNS

SEQ ID NO: 42128 - protein, 9 aa, synthetic construct
KELPMETHK

SEQ ID NO: 42129 - protein, 9 aa, synthetic construct
NNRPYELAN

SEQ ID NO: 42130 - protein, 9 aa, synthetic construct
KIHPQEASY

SEQ ID NO: 42131 - protein, 9 aa, synthetic construct
IALPQEKMD

SEQ ID NO: 42132 - protein, 9 aa, synthetic construct
VFTPSEYSS

SEQ ID NO: 42133 - protein, 9 aa, synthetic construct
NSDPNEPMK

SEQ ID NO: 42134 - protein, 9 aa, synthetic construct
DPKPAEFLF

SEQ ID NO: 42135 - protein, 9 aa, synthetic construct
KHTPAEYPY

SEQ ID NO: 42136 - protein, 9 aa, synthetic construct
LPQPDENHW

SEQ ID NO: 42137 - protein, 9 aa, synthetic construct
IHNPHESNP

SEQ ID NO: 42138 - protein, 9 aa, synthetic construct
KKMPSELWN

SEQ ID NO: 42139 - protein, 9 aa, synthetic construct
TPPPLEISQ

SEQ ID NO: 42140 - protein, 9 aa, synthetic construct
LYLPYENAM

SEQ ID NO: 42141 - protein, 9 aa, synthetic construct
VLSPPEYMQ

SEQ ID NO: 42142 - protein, 9 aa, synthetic construct
TIYPGEQHI

SEQ ID NO: 42143 - protein, 9 aa, synthetic construct
TKSPEELWI

SEQ ID NO: 42144 - protein, 9 aa, synthetic construct
KTTPDEDYT

SEQ ID NO: 42145 - protein, 9 aa, synthetic construct
DRYPLEHAL

SEQ ID NO: 42146 - protein, 9 aa, synthetic construct
YTLPYEYRH

SEQ ID NO: 42147 - protein, 9 aa, synthetic construct
YYPPKEHLR

SEQ ID NO: 42148 - protein, 9 aa, synthetic construct
RICPYECRV

SEQ ID NO: 42149 - protein, 9 aa, synthetic construct
MFTPKETMT

SEQ ID NO: 42150 - protein, 9 aa, synthetic construct
TVNPHEYRY

SEQ ID NO: 42151 - protein, 9 aa, synthetic construct
FQWPMEKNK

SEQ ID NO: 42152 - protein, 9 aa, synthetic construct
WFNPIELRF

SEQ ID NO: 42153 - protein, 9 aa, synthetic construct
CGSPSEMYY

SEQ ID NO: 42154 - protein, 9 aa, synthetic construct
VVNPVEPTL

SEQ ID NO: 42155 - protein, 9 aa, synthetic construct
SHSPHELAM

SEQ ID NO: 42156 - protein, 9 aa, synthetic construct
KTMPYEMYM

SEQ ID NO: 42157 - protein, 9 aa, synthetic construct
MPYPSEFNA

SEQ ID NO: 42158 - protein, 9 aa, synthetic construct
KDIPDENHS

SEQ ID NO: 42159 - protein, 9 aa, synthetic construct
TATPIEYPY

SEQ ID NO: 42160 - protein, 9 aa, synthetic construct
NATPLENYA

SEQ ID NO: 42161 - protein, 9 aa, synthetic construct
FIPPFELEY

SEQ ID NO: 42162 - protein, 9 aa, synthetic construct
NEHPLELLF

SEQ ID NO: 42163 - protein, 9 aa, synthetic construct
DGSPLEISM

SEQ ID NO: 42164 - protein, 9 aa, synthetic construct
NYIPMEMTS

SEQ ID NO: 42165 - protein, 9 aa, synthetic construct
NSYPCEKIN

SEQ ID NO: 42166 - protein, 9 aa, synthetic construct
MSRPIETNV

SEQ ID NO: 42167 - protein, 9 aa, synthetic construct
MCRPHEPLL

SEQ ID NO: 42168 - protein, 9 aa, synthetic construct
RWNPTELLN

SEQ ID NO: 42169 - protein, 9 aa, synthetic construct
IDIPYERQN

SEQ ID NO: 42170 - protein, 9 aa, synthetic construct
VDGPLESAS

SEQ ID NO: 42171 - protein, 9 aa, synthetic construct
APIPIETIY

SEQ ID NO: 42172 - protein, 9 aa, synthetic construct
SSIPGEFAH

SEQ ID NO: 42173 - protein, 9 aa, synthetic construct
TGAPREMLS

SEQ ID NO: 42174 - protein, 9 aa, synthetic construct
IYLPDEYLD

SEQ ID NO: 42175 - protein, 9 aa, synthetic construct
SMSPEEHLC

SEQ ID NO: 42176 - protein, 9 aa, synthetic construct
NTFPDESFL

SEQ ID NO: 42177 - protein, 9 aa, synthetic construct
FTPPGERPP

SEQ ID NO: 42178 - protein, 9 aa, synthetic construct
KALPLEAKY

SEQ ID NO: 42179 - protein, 9 aa, synthetic construct
PFRPPENSQ

SEQ ID NO: 42180 - protein, 9 aa, synthetic construct
VQNPFEFMN

SEQ ID NO: 42181 - protein, 9 aa, synthetic construct
SSMPVEHPL

SEQ ID NO: 42182 - protein, 9 aa, synthetic construct
LSSPRELVY

SEQ ID NO: 42183 - protein, 9 aa, synthetic construct
SLTPKESTP

SEQ ID NO: 42184 - protein, 9 aa, synthetic construct
NYGPLEVYR

SEQ ID NO: 42185 - protein, 9 aa, synthetic construct
CINPLEGGS

SEQ ID NO: 42186 - protein, 9 aa, synthetic construct
CNFPVEIWP

SEQ ID NO: 42187 - protein, 9 aa, synthetic construct
YTKPLEWDA

SEQ ID NO: 42188 - protein, 9 aa, synthetic construct
RDPPQEMGE

SEQ ID NO: 42189 - protein, 9 aa, synthetic construct
TIKPIEHPY

SEQ ID NO: 42190 - protein, 9 aa, synthetic construct
MAFPGELMF

SEQ ID NO: 42191 - protein, 9 aa, synthetic construct
NCPPYEEYG

SEQ ID NO: 42192 - protein, 9 aa, synthetic construct
KHHPLEYTY

SEQ ID NO: 42193 - protein, 9 aa, synthetic construct
FCHPSECVN

SEQ ID NO: 42194 - protein, 9 aa, synthetic construct
NAEPIEFEM

SEQ ID NO: 42195 - protein, 9 aa, synthetic construct
RGTPQEKPT

SEQ ID NO: 42196 - protein, 9 aa, synthetic construct
MRHPTEPLV

SEQ ID NO: 42197 - protein, 9 aa, synthetic construct
TPLPQENSL

SEQ ID NO: 42198 - protein, 9 aa, synthetic construct
LSPPSEYYV

SEQ ID NO: 42199 - protein, 9 aa, synthetic construct
DLFPKEYNL

SEQ ID NO: 42200 - protein, 9 aa, synthetic construct
NHIPNEFLV

SEQ ID NO: 42201 - protein, 9 aa, synthetic construct
FPLPKESFM

SEQ ID NO: 42202 - protein, 9 aa, synthetic construct
MCVPLEFLF

SEQ ID NO: 42203 - protein, 9 aa, synthetic construct
GVQPWEVDL

SEQ ID NO: 42204 - protein, 9 aa, synthetic construct
YQVPGERNN

SEQ ID NO: 42205 - protein, 9 aa, synthetic construct
DRKPNENDS

SEQ ID NO: 42206 - protein, 9 aa, synthetic construct
DYLPSEYTD

SEQ ID NO: 42207 - protein, 9 aa, synthetic construct
TLFPGEWLN

SEQ ID NO: 42208 - protein, 9 aa, synthetic construct
KFRPIEIAN

SEQ ID NO: 42209 - protein, 9 aa, synthetic construct
IGYPTENNG

SEQ ID NO: 42210 - protein, 9 aa, synthetic construct
KHSPSESTY

SEQ ID NO: 42211 - protein, 9 aa, synthetic construct
NLQPKENHN

SEQ ID NO: 42212 - protein, 9 aa, synthetic construct
SLLPDEYQS

SEQ ID NO: 42213 - protein, 9 aa, synthetic construct
SMLPKEGTS

SEQ ID NO: 42214 - protein, 9 aa, synthetic construct
TIKPIEWLT

SEQ ID NO: 42215 - protein, 9 aa, synthetic construct
LREPLETLV

SEQ ID NO: 42216 - protein, 9 aa, synthetic construct
YLHPLEKYF

SEQ ID NO: 42217 - protein, 9 aa, synthetic construct
DVPPSEVPC

SEQ ID NO: 42218 - protein, 9 aa, synthetic construct
SCYPQENGT

SEQ ID NO: 42219 - protein, 9 aa, synthetic construct
ELNPAENFI

SEQ ID NO: 42220 - protein, 9 aa, synthetic construct
NPFPREKSV

SEQ ID NO: 42221 - protein, 9 aa, synthetic construct
VIWPTEYTV

SEQ ID NO: 42222 - protein, 9 aa, synthetic construct
NHSPNEDPI

SEQ ID NO: 42223 - protein, 9 aa, synthetic construct
MILPREPAL

SEQ ID NO: 42224 - protein, 9 aa, synthetic construct
IVDPPEWSA

SEQ ID NO: 42225 - protein, 9 aa, synthetic construct
CESPKEFTS

SEQ ID NO: 42226 - protein, 9 aa, synthetic construct
LQAPSEIFK

SEQ ID NO: 42227 - protein, 9 aa, synthetic construct
SETPNEDDI

SEQ ID NO: 42228 - protein, 9 aa, synthetic construct
NPPPVEHNH

SEQ ID NO: 42229 - protein, 9 aa, synthetic construct
TSLPEETRL

SEQ ID NO: 42230 - protein, 9 aa, synthetic construct
TLPPTELSI

SEQ ID NO: 42231 - protein, 9 aa, synthetic construct
MYQPEENYA

SEQ ID NO: 42232 - protein, 9 aa, synthetic construct
THPPREFRH

SEQ ID NO: 42233 - protein, 9 aa, synthetic construct
ADPPTENLP

SEQ ID NO: 42234 - protein, 9 aa, synthetic construct
KRNPLEYGT

SEQ ID NO: 42235 - protein, 9 aa, synthetic construct
EFQPLEMPM

SEQ ID NO: 42236 - protein, 9 aa, synthetic construct
SHNPIESNF

SEQ ID NO: 42237 - protein, 9 aa, synthetic construct
NMLPIESNS

SEQ ID NO: 42238 - protein, 9 aa, synthetic construct
IQPPSEYTT

SEQ ID NO: 42239 - protein, 9 aa, synthetic construct
MDRPYEYSR

SEQ ID NO: 42240 - protein, 9 aa, synthetic construct
MPLPLENDV

SEQ ID NO: 42241 - protein, 9 aa, synthetic construct
YKRPSEKLT

SEQ ID NO: 42242 - protein, 9 aa, synthetic construct
VQSPYELLN

SEQ ID NO: 42243 - protein, 9 aa, synthetic construct
NFMPKEQSR

SEQ ID NO: 42244 - protein, 9 aa, synthetic construct
CSYPWESLY

SEQ ID NO: 42245 - protein, 9 aa, synthetic construct
IYGPVEVLS

SEQ ID NO: 42246 - protein, 9 aa, synthetic construct
LLTPHENVK

SEQ ID NO: 42247 - protein, 9 aa, synthetic construct
NNPPSENMR

SEQ ID NO: 42248 - protein, 9 aa, synthetic construct
APFPIEIDS

SEQ ID NO: 42249 - protein, 9 aa, synthetic construct
PTLPLEKYN

SEQ ID NO: 42250 - protein, 9 aa, synthetic construct
NLPPEEASM

SEQ ID NO: 42251 - protein, 9 aa, synthetic construct
FSPPSENQS

SEQ ID NO: 42252 - protein, 9 aa, synthetic construct
EQPPVEYIY

SEQ ID NO: 42253 - protein, 9 aa, synthetic construct
PTGPSETRS

SEQ ID NO: 42254 - protein, 9 aa, synthetic construct
YPPPPEPSP

SEQ ID NO: 42255 - protein, 9 aa, synthetic construct
SLSPNEILH

SEQ ID NO: 42256 - protein, 9 aa, synthetic construct
LDHPHEQVN

SEQ ID NO: 42257 - protein, 9 aa, synthetic construct
HRSPAEIRD

SEQ ID NO: 42258 - protein, 9 aa, synthetic construct
EPPPREHPI

SEQ ID NO: 42259 - protein, 9 aa, synthetic construct
YAHPMENDC

SEQ ID NO: 42260 - protein, 9 aa, synthetic construct
SHSPVEHRY

SEQ ID NO: 42261 - protein, 9 aa, synthetic construct
KTSPPELHR

SEQ ID NO: 42262 - protein, 9 aa, synthetic construct
KTIPPENIR

SEQ ID NO: 42263 - protein, 9 aa, synthetic construct
MAVPLEDHN

SEQ ID NO: 42264 - protein, 9 aa, synthetic construct
RSCPRELDG

SEQ ID NO: 42265 - protein, 9 aa, synthetic construct
MRPPSEYLH

SEQ ID NO: 42266 - protein, 9 aa, synthetic construct
DMFPSELHN

SEQ ID NO: 42267 - protein, 9 aa, synthetic construct
ITKPMEVRY

SEQ ID NO: 42268 - protein, 9 aa, synthetic construct
IHPPAETTS

SEQ ID NO: 42269 - protein, 9 aa, synthetic construct
RLPPAEPGP

SEQ ID NO: 42270 - protein, 9 aa, synthetic construct
EDSPAESLT

SEQ ID NO: 42271 - protein, 9 aa, synthetic construct
SQPPNELYQ

SEQ ID NO: 42272 - protein, 9 aa, synthetic construct
DDAPLEKCY

SEQ ID NO: 42273 - protein, 9 aa, synthetic construct
PSNPFEILI

SEQ ID NO: 42274 - protein, 9 aa, synthetic construct
DDSPSECDY

SEQ ID NO: 42275 - protein, 244 aa, synthetic construct; identical to SEQ ID NO: 9

SEQ ID NO: 42276 - protein, 41 aa, synthetic construct; identical to SEQ ID NO: 25

SEQ ID NO: 42277 - protein, 62 aa, synthetic construct; identical to SEQ ID NO: 32

SEQ ID NO: 42278 - protein, 159 aa, synthetic construct; identical to SEQ ID NO: 19

SEQ ID NO: 42279 - protein, 9 aa, synthetic construct
AAAGSGGSG

SEQ ID NO: 42280 - protein, 8 aa, synthetic construct
KPTNKAPH

SEQ ID NO: 42281 - protein, 4 aa, synthetic construct
PKQE

SEQ ID NO: 42282 - protein, 4 aa, synthetic construct
PVQE

SEQ ID NO: 42283 - protein, 4 aa, synthetic construct
SVQE

SEQ ID NO: 42284 - protein, 9 aa, synthetic construct
QEPQEINFP

SEQ ID NO: 42285 - protein, 7 aa, synthetic construct
KKPTNKA

SEQ ID NO: 42286 - protein, 7 aa, synthetic construct
SRISVQE

SEQ ID NO: 42287 - protein, 11 aa, synthetic construct
QASQSLSNLLA

SEQ ID NO: 42288 - protein, 7 aa, synthetic construct
GASNLES

SEQ ID NO: 42289 - protein, 8 aa, synthetic construct
QGGHYSGL

SEQ ID NO: 42290 - protein, 5 aa, synthetic construct
TNDMN

SEQ ID NO: 42291 - protein, 16 aa, synthetic construct
VIYSDDTPDYATWAKG

SEQ ID NO: 42292 - protein, 14 aa, synthetic construct
GHYDSAVYAYALNI

SEQ ID NO: 42293 - protein, 39 aa, synthetic construct
IEVMYPPPYLDNEKSNGTIIHVKGKHLCPSPLFPGPSKP

SEQ ID NO: 42294 - protein, 27 aa, synthetic construct
FWVLVVVGGVLACYSLLVTVAFIIFWV

SEQ ID NO: 42295 - protein, 41 aa, synthetic construct; identical to SEQ ID NO: 25

SEQ ID NO: 42296 - protein, 62 aa, synthetic construct; identical to SEQ ID NO: 32

SEQ ID NO: 42297 - protein, 440 aa, synthetic construct
MALPVTALLLPLALLLHAARPELVMTQTPSSVSAAVGGTVTITCQASQSLSNLLAWYQQKPGQPPKLLIYGASNLESGVPSRFRGSGSGTDFTLTISGMKAEDAATYYCQGGHYSGLTFGNGTNVEIKGGGGSGGGGSGGGGSQSLEESGGRLVTPGTPLTLTCTVSGFSLSTNDMNWVRQAPGKGLEWIGVIYSDDTPDYATWAKGRFTISRTSTTVDLKITSPTTEDTATYFCARGHYDSAVYAYALNIWGPGTLVTVSSAAAGSGGSGIEVMYPPPYLDNEKSNGTIIHVKGKHLCPSPLFPGPSKPFWVLVVVGGVLACYSLLVTVAFIIFWVRSKRSRLLHSDYMNMTPRRPGPTRKHYQPYAPPRDFAAYRSKKVAKKPTNKAPHPKQEPQEINFPDDLPGSNTAAPVQETLHGCQPVTQEDGKESRISVQERQ

SEQ ID NO: 42298 - protein, 419 aa, synthetic construct
ELVMTQTPSSVSAAVGGTVTITCQASQSLSNLLAWYQQKPGQPPKLLIYGASNLESGVPSRFRGSGSGTDFTLTISGMKAEDAATYYCQGGHYSGLTFGNGTNVEIKGGGGSGGGGSGGGGSQSLEESGGRLVTPGTPLTLTCTVSGFSLSTNDMNWVRQAPGKGLEWIGVIYSDDTPDYATWAKGRFTISRTSTTVDLKITSPTTEDTATYFCARGHYDSAVYAYALNIWGPGTLVTVSSAAAGSGGSGIEVMYPPPYLDNEKSNGTIIHVKGKHLCPSPLFPGPSKPFWVLVVVGGVLACYSLLVTVAFIIFWVRSKRSRLLHSDYMNMTPRRPGPTRKHYQPYAPPRDFAAYRSKKVAKKPTNKAPHPKQEPQEINFPDDLPGSNTAAPVQETLHGCQPVTQEDGKESRISVQERQ

SEQ ID NO: 42299 - protein, 15 aa, synthetic construct
  VARIANT 5..6: note = X is any amino acid
  VARIANT 8: note = X is any amino acid
  VARIANT 10: note = X is C, E, or A
  VARIANT 11..15: note = X is any amino acid
GSNTXXPXQXXXXXX

SEQ ID NO: 42300 - protein, 15 aa, synthetic construct
  VARIANT 5..6: note = X is any amino acid
  VARIANT 7: note = X is P, S, A, or T
  VARIANT 8: note = X is any amino acid
  VARIANT 9: note = X is Q or E
  VARIANT 11..15: note = X is any amino acid
GSNTXXXXXEXXXXX

SEQ ID NO: 42301 - protein, 10 aa, synthetic construct
  VARIANT 6: note = X is any amino acid
  VARIANT 8..9: note = X is any amino acid
  VARIANT 10: note = X is any acidic or aromatic amino acid
PKQEPXEXXX

SEQ ID NO: 42302 - protein, 21 aa, synthetic construct
MALPVTALLLPLALLLHAARP

SEQ ID NO: 42303 - protein, 107 aa, synthetic construct
ELVMTQTPSSVSAAVGGTVTITCQASQSLSNLLAWYQQKPGQPPKLLIYGASNLESGVPSRFRGSGSGTDFTLTISGMKAEDAATYYCQGGHYSGLTFGNGTNVEIK

SEQ ID NO: 42304 - protein, 15 aa, synthetic construct
GGGGSGGGGSGGGGS

SEQ ID NO: 42305 - protein, 119 aa, synthetic construct
QSLEESGGRLVTPGTPLTLTCTVSGFSLSTNDMNWVRQAPGKGLEWIGVIYSDDTPDYATWAKGRFTISRTSTTVDLKITSPTTEDTATYFCARGHYDSAVYAYALNIWGPGTLVTVSS

SEQ ID NO: 42306 - protein, 9 aa, synthetic construct
AAAGSGGSG

SEQ ID NO: 42307 - protein, 38 aa, synthetic construct
IEVMYPPPYLDNEKSNGTBHVKGKHLCPSPLFPGPSKP

SEQ ID NO: 42308 - protein, 27 aa, synthetic construct
FWVLVVVGGVLACYSLLVTVAFIIFWV

SEQ ID NO: 42309 - protein, 41 aa, synthetic construct; identical to SEQ ID NO: 25

SEQ ID NO: 42310 - protein, 720 aa, synthetic construct
MGVLLTQRTLLSLVLALLFPSMASMQVQLQQSGAELVKPGASVKISCKASGYSFTGYFMNWVKQSHGKSLEWIGRIHPYDGDTFYNQNFKDKATLTVDKSSNTAHMELLSLTSEDFAVYYCTRYDGSRAMDYWGQGTTVTVSSGGGGSGGGGSGGGGSDIELTQSPASLAVSLGQRAIISCKASQSVSFAGTSLMHWYHQKPGQQPKLLIYRASNLEAGVPTRFSGSGSKTDFTLNIHPVEEEDAATYYCQQSREYPYTFGGGTKLEIKAAAGSGGSGILVKQSPMLVAYDNAVNLSCKYSYNLFSREFRASLHKGLDSAVEVCVVYGNYSQQLQVYSKTGFNCDGKLGNESVTFYLQNLYVNQTDIYFCKIEVMYPPPYLDNEKSNGTIIHVKGKHLCPSPLFPGPSKPFWVLVVVGGVLACYSLLVTVAFIIFWVRSKRSRLLHSDYMNMTPRRPGPTRKHYQPYAPPRDFAAYRSILVKQSPMLVAYDNAVNLSCKYSYNLFSREFRASLHKGLDSAVEVCVVYGNYSQQLQVYSKTGFNCDGKLGNESVTFYLQNLYVNQTDIYFCKIEVMYPPPYLDNEKSNGTIIHVKGKHLCPSPLFPGPSKPFWVLVVVGGVLACYSLLVTVAFIIFWVRSKRSRLLHSDYMNMTPRRPGPTRKHYQPYAPPRDFAAYRSKKVAKKPTNKAPHPKQEPQEINFPDDLPGSNTAAPVQETLHG

SEQ ID NO: 42311 - protein, 695 aa, synthetic construct
QVQLQQSGAELVKPGASVKISCKASGYSFTGYFMNWVKQSHGKSLEWIGRIHPYDGDTFYNQNFKDKATLTVDKSSNTAHMELLSLTSEDFAVYYCTRYDGSRAMDYWGQGTTVTVSSGGGGSGGGGSGGGGSDIELTQSPASLAVSLGQRAIISCKASQSVSFAGTSLMHWYHQKPGQQPKLLIYRASNLEAGVPTRFSGSGSKTDFTLNIHPVEEEDAATYYCQQSREYPYTFGGGTKLEIKAAAGSGGSGILVKQSPMLVAYDNAVNLSCKYSYNLFSREFRASLHKGLDSAVEVCVVYGNYSQQLQVYSKTGFNCDGKLGNESVTFYLQNLYVNQTDIYFCKIEVMYPPPYLDNEKSNGTIIHVKGKHLCPSPLFPGPSKPFWVLVVVGGVLACYSLLVTVAFIIFWVRSKRSRLLHSDYMNMTPRRPGPTRKHYQPYAPPRDFAAYRSILVKQSPMLVAYDNAVNLSCKYSYNLFSREFRASLHKGLDSAVEVCVVYGNYSQQLQVYSKTGFNCDGKLGNESVTFYLQNLYVNQTDIYFCKIEVMYPPPYLDNEKSNGTIIHVKGKHLCPSPLFPGPSKPFWVLVVVGGVLACYSLLVTVAFIIFWVRSKRSRLLHSDYMNMTPRRPGPTRKHYQPYAPPRDFAAYRSKKVAKKPTNKAPHPKQEPQEINFPDDLPGSNTAAPVQETLHG

SEQ ID NO: 42312 - protein, 440 aa, synthetic construct; identical to SEQ ID NO: 42297

SEQ ID NO: 42313 - protein, 419 aa, synthetic construct; identical to SEQ ID NO: 42298

SEQ ID NO: 42314 - protein, 517 aa, synthetic construct; identical to SEQ ID NO: 348

SEQ ID NO: 42315 - protein, 492 aa, synthetic construct
QVKLEQSGAEVVKPGASVKLSCKASGFNIKDSYMHWLRQGPGQRLEWIGWIDPENGDTEYAPKFQGKATFTTDTSANTAYLGLSSLRPEDTAVYYCNEGTPTGPYYFDYWGQGTLVTVSSGGGGSGGGGSGGGGSENVLTQSPSSMSASVGDRVNIACSASSSVSYMHWFQQKPGKSPKLWIYSTSNLASGVPSRFSGSGSGTDYSLTISSMQPEDAATYYCQQRSSYPLTFGGGTKLEIKAAAGSGGSGGEINGSANYEMFIFHNGGVQILCKYPDIVQQFKMQLLKGGQILCDLTKTKGSGNTVSIKSLKFCHSQLSNNSVSFFLYNLDHSHANYYFCNLSIFDPPPFKVTLTGGYLHIYESQLCCQLKFWLPIGCAAFVVVCILGCILICWLTKKKYSSSVHDPNGEYMFMRAVNTAKKSRLTDVTLKKVAKKPTNKAPHPKQEPQEINFPDDLPGSNTAAPVQETLHGCQPVTQEDGKESRISVQERQ

SEQ ID NO: 42316 - protein, 536 aa, synthetic construct; identical to SEQ ID NO: 192

SEQ ID NO: 42317 - protein, 511 aa, synthetic construct
QVQLQQSGPELEKPGASVKLSCKASGYSFTGYTMNWVKQSHGKSLEWIGLITPYNGASSYNQKFRGKATLTVDKSSSTAYMDLLSLTSEDSAVYFCARGGYDGRGFDYWGQGTTVTVSSGGGGSGGGGSGGGGSDIELTQSPAIMSASPGEKVTMTCSASSSVSYMHWYQQKSGTSPKRWIYDTSKLASGVPGRFSGSGSGNSYSLTISSVEAEDDATYYCQQWSKHPLTFGAGTKLEIKAAAGSGGSGILVKQSPMLVAYDNAVNLSCKYSYNLFSREFRASLHKGLDSAVEVCVVYGNYSQQLQVYSKTGFNCDGKLGNESVTFYLQNLYVNQTDIYFCKIEVMYPPPYLDNEKSNGTIIHVKGKHLCPSPLFPGPSKPFWVLVVVGGVLACYSLLVTVAFIIFWVRSKRSRLLHSDYMNMTPRRPGPTRKHYQPYAPPRDFAAYRSKKVAKKPTNKAPHPKQEPQEINFPDDLPGSNTAAPVQETLHGCQPVTQEDGKESRISVQERQ

SEQ ID NO: 42318 - protein, 117 aa, synthetic construct
QVQLQQSGPELEKPGASVKLSCKASGYSFTGYTMNWVKQSHGKSLEWIGLITPYNGASSYNQKFRGKATLTVDKSSSTAYMDLLSLTSEDSAVYFCARGGYDGRGFDYWGQGTTVTV

SEQ ID NO: 42319 - protein, 106 aa, synthetic construct
DIELTQSPAIMSASPGEKVTMTCSASSSVSYMHWYQQKSGTSPKRWIYDTSKLASGVPGRFSGSGSGNSYSLTISSVEAEDDATYYCQQWSKHPLTFGAGTKLEIK

SEQ ID NO: 42320 - protein, 532 aa, synthetic construct; identical to SEQ ID NO: 210

SEQ ID NO: 42321 - protein, 507 aa, synthetic construct
QVQLVQSGAEVEKPGASVKVSCKASGYTFTDYYMHWVRQAPGQGLEWMGWINPNSGGTNYAQKFQGRVTMTRDTSISTAYMELSRLRSDDTAVYYCASGWDFDYWGQGTLVTVSSGGGGSGGGGSGGGGSDIVMTQSPSSLSASVGDRVTITCRASQSIRYYLSWYQQKPGKAPKLLIYTASILQNGVPSRFSGSGSGTDFTLTISSLQPEDFATYYCLQTYTTPDFGPGTKVEIKAAAGSGGSGILVKQSPMLVAYDNAVNLSCKYSYNLFSREFRASLHKGLDSAVEVCVVYGNYSQQLQVYSKTGFNCDGKLGNESVTFYLQNLYVNQTDIYFCKIEVMYPPPYLDNEKSNGTIIHVKGKHLCPSPLFPGPSKPFWVLVVVGGVLACYSLLVTVAFIIFWVRSKRSRLLHSDYMNMTPRRPGPTRKHYQPYAPPRDFAAYRSKKVAKKPTNKAPHPKQEPQEINFPDDLPGSNTAAPVQETLHGCQPVTQEDGKESRISVQERQ

SEQ ID NO: 42322 - protein, 113 aa, synthetic construct
QVQLVQSGAEVEKPGASVKVSCKASGYTFTDYYMHWVRQAPGQGLEWMGWINPNSGGTNYAQKFQGRVTMTRDTSISTAYMELSRLRSDDTAVYYCASGWDFDYWGQGTLVTV

SEQ ID NO: 42323 - protein, 106 aa, synthetic construct
DIVMTQSPSSLSASVGDRVTITCRASQSIRYYLSWYQQKPGKAPKLLIYTASILQNGVPSRFSGSGSGTDFTLTISSLQPEDFATYYCLQTYTTPDFGPGTKVEIK

SEQ ID NO: 42324 - protein, 537 aa, synthetic construct; identical to SEQ ID NO: 228

SEQ ID NO: 42325 - protein, 512 aa, synthetic construct
QVQLVQSGAEVKRPGASVQVSCRASGYSINTYYMQWVRQAPGAGLEWMGVINPSGVTSYAQKFQGRVTLTNDTSTNTVYMQLNSLTSADTAVYYCARWALWGDFGMDVWGKGTLVTVSSGGGGSGGGGSGGGGSDIQMTQSPSTLSASIGDRVTITCRASEGIYHWLAWYQQKPGKAPKLLIYKASSLASGAPSRFSGSGSGTDFTLTISSLQPDDFATYYCQQYSNYPLTFGGGTKLEIKAAAGSGGSGILVKQSPMLVAYDNAVNLSCKYSYNLFSREFRASLHKGLDSAVEVCVVYGNYSQQLQVYSKTGFNCDGKLGNESVTFYLQNLYVNQTDIYFCKIEVMYPPPYLDNEKSNGTIIHVKGKHLCPSPLFPGPSKPFWVLVVVGGVLACYSLLVTVAFIIFWVRSKRSRLLHSDYMNMTPRRPGPTRKHYQPYAPPRDFAAYRSKKVAKKPTNKAPHPKQEPQEINFPDDLPGSNTAAPVQETLHGCQPVTQEDGKESRISVQERQ

SEQ ID NO: 42326 - protein, 117 aa, synthetic construct
QVQLVQSGAEVKRPGASVQVSCRASGYSINTYYMQWVRQAPGAGLEWMGVINPSGVTSYAQKFQGRVTLTNDTSTNTVYMQLNSLTSADTAVYYCARWALWGDFGMDVWGKGTLVTV

SEQ ID NO: 42327 - protein, 107 aa, synthetic construct
DIQMTQSPSTLSASIGDRVTITCRASEGIYHWLAWYQQKPGKAPKLLIYKASSLASGAPSRFSGSGSGTDFTLTISSLQPDDFATYYCQQYSNYPLTFGGGTKLEIK

SEQ ID NO: 42328 - protein, 537 aa, synthetic construct; identical to SEQ ID NO: 246

SEQ ID NO: 42329 - protein, 512 aa, synthetic construct
QVQLQESGPGLVKPSETLSLTCTVSGGSVSSGSYYWSWIRQPPGKGLEWIGYIYYSGSTNYNPSLKSRVTISVDTSKNQFSLKLSSVTAADTAVYYCAREGKNGAFDIWGQGTMVTVSSGGGGSGGGGSGGGGSDIQMTQSPSSLSASVGDRVTITCRASQSISSYLNWYQQKPGKAPKLLIYAASSLQSGVPSGFSGSGSGTDFTLTISSLQPEDFATYYCQQSYSTPLTFGGGTKVEIKAAAGSGGSGILVKQSPMLVAYDNAVNLSCKYSYNLFSREFRASLHKGLDSAVEVCVVYGNYSQQLQVYSKTGFNCDGKLGNESVTFYLQNLYVNQTDIYFCKIEVMYPPPYLDNEKSNGTIIHVKGKHLCPSPLFPGPSKPFWVLVVVGGVLACYSLLVTVAFIIFWVRSKRSRLLHSDYMNMTPRRPGPTRKHYQPYAPPRDFAAYRSKKVAKKPTNKAPHPKQEPQEINFPDDLPGSNTAAPVQETLHGCQPVTQEDGKESRISVQERQ

SEQ ID NO: 42330 - protein, 117 aa, synthetic construct
QVQLQESGPGLVKPSETLSLTCTVSGGSVSSGSYYWSWIRQPPGKGLEWIGYIYYSGSTNYNPSLKSRVTISVDTSKNQFSLKLSSVTAADTAVYYCAREGKNGAFDIWGQGTMVTV

SEQ ID NO: 42331 - protein, 107 aa, synthetic construct
DIQMTQSPSSLSASVGDRVTITCRASQSISSYLNWYQQKPGKAPKLLIYAASSLQSGVPSGFSGSGSGTDFTLTISSLQPEDFATYYCQQSYSTPLTFGGGTKVEIK

SEQ ID NO: 42332 - protein, 545 aa, synthetic construct; identical to SEQ ID NO: 264

SEQ ID NO: 42333 - protein, 520 aa, synthetic construct
EVQLVESGGGLVQPGGSLRLSCAASGFDLGFYFYACWVRQAPGKGLEWVSCIYTAGSGSTYYASWAKGRFTISRDNSKNTLYLQMNSLRAEDTAVYYCARSTANTRSTYYLNLWGQGTLVTVSSGGGGSGGGGSGGGGSDIQMTQSPSSLSASVGDRVTITCQASQRISSYLSWYQQKPGKVPKLLIYGASTLASGVPSRFSGSGSGTDFTLTISSLQPEDVATYYCQSYAYFDSNNWHAFGGGTKVEIAAAGSGGSGILVKQSPMLVAYDNAVNLSCKYSYNLFSREFRASLHKGLDSAVEVCVVYGNYSQQLQVYSKTGFNCDGKLGNESVTFYLQNLYVNQTDIYFCKIEVMYPPPYLDNEKSNGTIIHVKGKHLCPSPLFPGPSKPFWVLVVVGGVLACYSLLVTVAFIIFWVRSKRSRLLHSDYMNMTPRRPGPTRKHYQPYAPPRDFAAYRSKKVAKKPTNKAPHPKQEPQEINFPDDLPGSNTAAPVQETLHGCQPVTQEDGKESRISVQERQ

SEQ ID NO: 42334 - protein, 122 aa, synthetic construct
EVQLVESGGGLVQPGGSLRLSCAASGFDLGFYFYACWVRQAPGKGLEWVSCIYTAGSGSTYYASWAKGRFTISRDNSKNTLYLQMNSLRAEDTAVYYCARSTANTRSTYYLNLWGQGTLVTV

SEQ ID NO: 42335 - protein, 110 aa, synthetic construct
DIQMTQSPSSLSASVGDRVTITCQASQRISSYLSWYQQKPGKVPKLLIYGASTLASGVPSRFSGSGSGTDFTLTISSLQPEDVATYYCQSYAYFDSNNWHAFGGGTKVEI

SEQ ID NO: 42336 - protein, 550 aa, synthetic construct; identical to SEQ ID NO: 282

SEQ ID NO: 42337 - protein, 525 aa, synthetic construct
QVQLQQSGPGLVTPSQTLSLTCAISGDSVSSNSATWNWIRQSPSRGLEWLGRTYYRSKWYNDYAVSVKSRMSINPDTSKNQFSLQLNSVTPEDTAVYYCARGMMTYYYGMDVWGQGTTVTVSSGGGGSGGGGSGGGGSQPVLTQSSSLSASPGASASLTCTLRSGINVGPYRIYWYQQKPGSPPQYLLNYKSDSDKQQGSGVPSRFSGSKDASANAGVLLISGLRSEDEADYYCMIWHSSAAVFGGGTQLTVLSAAAGSGGSGILVKQSPMLVAYDNAVNLSCKYSYNLFSREFRASLHKGLDSAVEVCVVYGNYSQQLQVYSKTGFNCDGKLGNESVTFYLQNLYVNQTDIYFCKIEVMYPPPYLDNEKSNGTIIHVKGKHLCPSPLFPGPSKPFWVLVVVGGVLACYSLLVTVAFIIFWVRSKRSRLLHSDYMNMTPRRPGPTRKHYQPYAPPRDFAAYRSKKVAKKPTNKAPHPKQEPQEINFPDDLPGSNTAAPVQETLHGCQPVTQEDGKESRISVQERQ

SEQ ID NO: 42338 - protein, 9 aa, synthetic construct
MNYPEENDW

SEQ ID NO: 42339 - protein, 121 aa, synthetic construct
QVQLQQSGPGLVTPSQTLSLTCAISGDSVSSNSATWNWIRQSPSRGLEWLGRTYYRSKWYNDYAVSVKSRMSINPDTSKNQFSLQLNSVTPEDTAVYYCARGMMTYYYGMDVWGQGTTVTV

SEQ ID NO: 42340 - protein, 116 aa, synthetic construct
QPVLTQSSSLSASPGASASLTCTLRSGINVGPYRIYWYQQKPGSPPQYLLNYKSDSDKQQGSGVPSRFSGSKDASANAGVLLISGLRSEDEADYYCMIWHSSAAVFGGGTQLTVLS

SEQ ID NO: 42341 - protein, 25 aa, synthetic construct
MGVLLTQRTLLSLVLALLFPSMASM

SEQ ID NO: 42342 - protein, 118 aa, synthetic construct
QVQLQQSGAELVKPGASVKISVKASGYSFTGYFMNWVKQSHGKSLEWIGRIHPYDGDTFYNQNFKDKATLTVDKSSNTAHMELLSLTSEDFAVYYCTRYDGSRAMDYWGQGTTVTVSS

SEQ ID NO: 42343 - protein, 14 aa, synthetic construct
GGGSGGGGSGGGGS

SEQ ID NO: 42344 - protein, 110 aa, synthetic construct
DIELTQSPASLAVSLGQRAIISCKASQSVSFAGTSLMHWHQKPGQQPKLLIYRASNLEAGVPTRFSGSGSKTDFTLNIHPVEEEDAATYYCQQSREYPYTFGGGTKLEIK

SEQ ID NO: 42345 - protein, 9 aa, synthetic construct
AAAGSGGSG

SEQ ID NO: 42346 - protein, 200 aa, synthetic construct
ILVKQSPMLVAYDNAVNLSCKYSYNLFSREFRASLHKGLDSAVEVCVVYGNYSQQLQVYSKTGFNCDGKLGNESVTFYLQNLYVNQTDIYFCKIEVMYPPPYLDNEKSNGTIIHVKGKHLCPSPLFPGPSKPFWVLVVVGGVLACYSLLVTVAFIIFWVRSKRSRLLHSDYMNMTPRRPGPTRKHYQPYAPPRDFAAYRS

SEQ ID NO: 42347 - protein, 39 aa, synthetic construct; identical to SEQ ID NO: 42293

SEQ ID NO: 42348 - protein, 27 aa, synthetic construct
FWVLVVVGGVLACYSIIVTVAFIIFWV

SEQ ID NO: 42349 - protein, 41 aa, synthetic construct; identical to SEQ ID NO: 25

SEQ ID NO: 42350 - protein, 21 aa, synthetic construct
MALPVTALLLPLALLLHAARP

SEQ ID NO: 42351 - protein, 107 aa, synthetic construct; identical to SEQ ID NO: 42303

SEQ ID NO: 42352 - protein, 15 aa, synthetic construct
GGGGSGGGGSGGGGS

SEQ ID NO: 42353 - protein, 119 aa, synthetic construct; identical to SEQ ID NO: 42305

SEQ ID NO: 42354 - protein, 9 aa, synthetic construct
AAAGSGGSG

SEQ ID NO: 42355 - protein, 39 aa, synthetic construct; identical to SEQ ID NO: 42293

SEQ ID NO: 42356 - protein, 27 aa, synthetic construct
FWVLVVVGGVLACYSLLVTVAFIIFWV

SEQ ID NO: 42357 - protein, 41 aa, synthetic construct; identical to SEQ ID NO: 25

SEQ ID NO: 42358 - protein, 25 aa, synthetic construct
MGVLLTQRTLLSLVLALLFPSMASM

SEQ ID NO: 42359 - protein, 120 aa, synthetic construct
QVKLEQSGAEVVKPGASVKLSCKASGFNIKDSYMHWLRQGPGQRLEWIGWIDPENGDTEYAPKFQGKATFTTDTSANTAYLGLSSLRPEDTAVYYCNEGTPTGPYYFDYWGQGTLVTVSS

SEQ ID NO: 42360 - protein, 106 aa, synthetic construct
ENVLTQSPSSMSASVGDRVNIACSASSSVSYMHWFQQKPGKSPKLWIYSTSNLASGVPSRFSGSGSGTDYSLTISSMQPEDAATYYCQQRSSYPLTFGGGTKLEIK

SEQ ID NO: 42361 - protein, 180 aa, synthetic construct
GEINGSANYEMFIFHNGGVQILCKYPDIVQQFKMQLLKGGQILCDLTKTKGSGNTVSIKSLKFCHSQLSNNSVSFFLYNLDHSHANYYFCNLSIFDPPPFKVTLTGGYLHIYESQLCCQLKFWLPIGCAAFVVVCILGCILICWLTKKKYSSSVHDPNGEYMFMRAVNTAKKSRLTDVTL

SEQ ID NO: 42362 - protein, 117 aa, synthetic construct; identical to SEQ ID NO: 42318

SEQ ID NO: 42363 - protein, 106 aa, synthetic construct; identical to SEQ ID NO: 42319

SEQ ID NO: 42364 - protein, 113 aa, synthetic construct; identical to SEQ ID NO: 42322

SEQ ID NO: 42365 - protein, 106 aa, synthetic construct; identical to SEQ ID NO: 42323

SEQ ID NO: 42366 - protein, 117 aa, synthetic construct; identical to SEQ ID NO: 42326

SEQ ID NO: 42367 - protein, 107 aa, synthetic construct; identical to SEQ ID NO: 42327

SEQ ID NO: 42368 - protein, 117 aa, synthetic construct; identical to SEQ ID NO: 42330

SEQ ID NO: 42369 - protein, 107 aa, synthetic construct; identical to SEQ ID NO: 42331

SEQ ID NO: 42370 - protein, 122 aa, synthetic construct; identical to SEQ ID NO: 42334

SEQ ID NO: 42371 - protein, 110 aa, synthetic construct; identical to SEQ ID NO: 42335

SEQ ID NO: 42372 - protein, 121 aa, synthetic construct; identical to SEQ ID NO: 42339

SEQ ID NO: 42373 - protein, 116 aa, synthetic construct; identical to SEQ ID NO: 42340

SEQ ID NO: 42374 - protein, 159 aa, synthetic construct; identical to SEQ ID NO: 19

SEQ ID NO: 42375 - protein, 41 aa, synthetic construct; identical to SEQ ID NO: 25

SEQ ID NO: 42376 - protein, 478 aa, synthetic construct
MGVLLTQRTLLSLVLALLFPSMASMQVQLQQSGAELVKPGASVKISCKASGYSFTGYFMNWVKQSHGKSLEWIGRIHPYDGDTFYNQNFKDKATLTVDKSSNTAHMELLSLTSEDFAVYYCTRYDGSRAMDYWGQGTTVTVSSGGGGSGGGGSGGGGSDIELTQSPASLAVSLGQRAIISCKASQSVSFAGTSLMHWYHQKPGQQPKLLIYRASNLEAGVPTRFSGSGSKTDFTLNIHPVEEEDAATYYCQQSREYPYTFGGGTKLEIKAAAGSGGSGILVKQSPMLVAYDNAVNLSCKYSYNLFSREFRASLHKGLDSAVEVCVVYGNYSQQLQVYSKTGFNCDGKLGNESVTFYLQNLYVNQTDIYFCKIEVMYPPPYLDNEKSNGTIIHVKGKHLCPSPLFPGPSKPFWVLVVVGGVLACYSLLVTVAFIIFWVRSKRSRLLHSDYMNMTPRRPGPTRKHYQPYAPPRDFAAYRS

SEQ ID NO: 42377 - protein, 15 aa, synthetic construct
  VARIANT 1..2: note = X is any amino acid
  VARIANT 4: note = X is any amino acid
  VARIANT 6: note = X is C, E, or A
  VARIANT 7..11: note = X is any amino acid
XXPXQXXXXXXQPVT

SEQ ID NO: 42378 - protein, 19 aa, synthetic construct
  VARIANT 5..6: note = X is any amino acid
  VARIANT 8: note = X is any amino acid
  VARIANT 10: note = X is C, E, or A
  VARIANT 11..15: note = X is any amino acid
GSNTXXPXQXXXXXXQPVT

SEQ ID NO: 42379 - protein, 15 aa, synthetic construct
  VARIANT 1..2: note = X is any amino acid
  VARIANT 3: note = X is P, S, A, or T
  VARIANT 4: note = X is any amino acid
  VARIANT 5: note = X is Q or E
  VARIANT 7..11: note = X is any amino acid
XXXXXEXXXXXQPVT

SEQ ID NO: 42380 - protein, 19 aa, synthetic construct
  VARIANT 5..6: note = X is any amino acid
  VARIANT 7: note = X is P, S, A, or T
  VARIANT 8: note = X is any amino acid
  VARIANT 9: note = X is Q or E
  VARIANT 11..15: note = X is any amino acid
GSNTXXXXXEXXXXXQPVT

SEQ ID NO: 42381 - protein, 10 aa, synthetic construct
  VARIANT 2: note = X is any amino acid
  VARIANT 4..5: note = X is any amino acid
  VARIANT 6: note = X is any acidic or aromatic amino acid
PXEXXXPDDL

SEQ ID NO: 42382 - protein, 14 aa, synthetic construct
  VARIANT 6: note = X is any amino acid
  VARIANT 8..9: note = X is any amino acid
  VARIANT 10: note = X is any acidic or aromatic amino acid
PKQEPXEXXXPDDL
